United States Patent Application Publication US 2007/0020625 A1 - sequence listing, part 2

SEQ ID NO: 38 - DNA, 618776 bp, Photorhabdus luminescens
  misc_feature (554060)..(554060): n is a, c, g, or t
  misc_feature (569837)..(569837): n is a, c, g, or t
cacgaactgaaagaggaactgctggaagcagaaaagactggcgcaaacaagcagacgatttacgacaagtttaaggagcgtagcgagaaaaatcgtcaggaaggtgtcgcggataactgctcccataatccgggctgtgtggtatccgtctgggaaatgatgaactcgggaacagacgtcgccagtggcctgaaccggacttctttcttctccagtctcagtagtgaggagatggcacagttaaaccgctttgtgcaggcggagaatgcggaaagtgcccaggcgatttaccagtcgctgccagatgtggtaaagaaggttgttgaaggcaaggagttcgcagaacagtttggtgtaatgccgaaagtgggcggcagtagcgggataattggactagggatagccgggaagaagcctgcgacaaaagacacaggcaatacgggtacaaaaggcactaatgctgctcataatcagcaagttaataaatcaaatttagctaccgcagagaaagacattgtacttattgaacaaggtaagaaaggtggttggagtaaggtactgaataagcctgaacccaataaaatttatcatgtaagacatgcaagcggggagaaaatttatcatacagatggattaagcaggccagtccatatcgaaacttcactacatttatccaagaatgaccgtaatacttatcagcaatgtaaagcaggtaaatgtggtaatccgggagatgaaggcgggcatttaatcgctagtatttttggtggcccaggcgagcgattaaatgttgttcctatggatggaaacttaaataaaggtgcctggaagcagatggagaattcttgggctaaagaactaaaggcaggtaagaaggttgatgtgaaaatacaacctatatatagtgataatagtaaccgccctgtcagttttaatgttacctataaggtagataatgaaaggccaataagattaaacatagataatgttcctgggggcaagaaatgagtctagatgataaaatatatgctgagatcggccaattgttatataacgcagctcctgataatgcgaaaaaaattattatggatacggagttatctcctgaaggtgattgttgtcaatttaaatatgattacatcgattccaacgatgaaatgcgctggtttttacctgaagacgggataatagatcatagattgagggaactattagtcacattaagacaattttttatagaaaatgttcattcagagagaaaacctcattggtcgggttgtatagtcactattgatgtagaacaaatgaagctcaatatagacttcaaatacgaaaactaatctgaaagagatctcagccaaggcgctgggattttctctgtagccatcaattgttctcaacgagccggataatcaactgtccggcctcgctggtattggtgatcggtttcaccatgggtaaggctaaacaaaaaaatcggattttaaaaccgaacaccatagcgtgagtatcagcaccggcggttcagccggcggcatgttcctcagtaatctggcggccaacaccctgggcggcgctaaccgggaaggccatgcccaaagcaccactcacgccgcggtcagtgacggcaccctgattatccgggataaagaccaccagcaacaggatgtcaccaccctcagccgggataccgaccatgctaacaatgccctcagccctatctttgacaaagagaaagaacagcaacggctgaaacaggcccaactgattggcgaaatcagtgcgcaggtgattgatatcgccagtaccgaaggggccattatcgccaccaaagcagccaacgccaaactggagaacatcagtgacccggatagagaagcggctataaaagtactgaaggataaaggtaaaaccgacatcaccccggcgcttattaaagaccagatttacaagactgcctataacgcggcattgaatgagtctggtctgggcaccggtggaaaataccactctgctttacaggcggctaccgcggccattcaggggctcgcgggcggaaatatcggtcaggcactggcaggcggcgcttctccttatctggccggggtgattaaagacctgaccaccgacccgaaaactcatcaagtcgatgtcgtcaccaatactctggcccatgccattctgggggcagtggccgccgaagtcagtggtaacaatgcgctggcgggtgcggcaggcggtgaactggccgcccgagaactgatgaagcatattcacggcgaaaatgctaaagtcagcgacttaagtgaagaggaaaaacagaccatcagcactctttctactttggcggccgggctggccggcggcattgccggtgactccaccggaagcgccgttaccggggcccaggccgggaagaatgcggttgagaacaacttcctgaaggcaggtcagatcacctcatggttggaaaaatataaagcatcatctactgatgaagaaaagaatcgtttaattgaggttgctagtaaagctgatcaagatcagcaacaaaaagctattgaaactaagatttcaaaagattatctgatgaaacaacaggaagagttgataaagcttattcaatcaccaaattgtgacgctgactgtacaaaattaacagaatatagccttaaccagattagcccagtaattgataattacgatacattgcagaaaagcaataatatcccacgggcagtaattgcaacaatttctctagccttaccgacattagctaaaacggctacacctgctgttactaattggattggaagtacgactattgcaaacagagctataggtgtaggtactacaggcttagccaacctaggaatgcaaggttacaacatctacaacaatcctcaagaaaactttagctataccagtttcgggacatctttgattacaggcggtgcaacggcaggaatggggtattggggtactgctgcgactaatacattaggagcaggtgtttctagcgtaattgatggaaattctccgtggttaccaatgggaggcgcgtttgtaggatcatcagtaggttatggagtgacaaagggaactactaactatttggataataaaatgaatccttggtcaaatggatttaaagaaagattcaatttaatcaatccttcgatatctgcaccaccgttagtatcccctgctcctggcattgttggtagtgcagtaggagctgttggttctgaaactgcaaataaagtaatcatggatgagttaagctctaaggataaaaaatgaaatttataatctattttttatattggtctttagttcagagcataggtgtgttcatcacggtcatggcggtaaaactgttagttaaatttgttctttattttgaaactggcgtgtttttcatcggttataaagatattgttgaggctattggaataggtgttgttatggggatattcctaggtggtgttatttgtttgataaattatcttcaacataaaagattttaggaaaagtttaatgtcgtcataatgttaaaaagatcccaactaaagtgaactaccccccgaaagttggacacccaacaagtagggggaagttctgcatgaagaattacagtaagtgtttgatcacatttaagcggacatcgcttcatcagacctggtagaacacagcaaacagaccagtaaaggcttactctccaaatcctccgtcgaaacccacgatgaagtgcatgaacgccgggcacaaagcaccacgctcagcggcgaccgcgtaaccttacaaaccggaaatgacctcaacatcatcggcagtaacgtggctggcactcaggatgttcatctggccgcaggcaatcagctcaccatcactaccgcggatgaagcccgtcatgaaacgcacttcaaacaagagaaaaaatcgggtctgatggggaccggcggtatcggcttctccgtcggcaaagccagccaaaaatcgactaccgatatcgacagcaacctcaacaaaggcagcacggtaggcagcagccagggcagtgtgacattcagcgccggaaaacagctcagcattcacggcagtgatgtcgtggcgggccgcgatacgcaactttccggccaaaacattcacatcaccagtgcggaaaacagtcacaccgctatcaccaaaaccgaacagaaacaaagcggcctgaccgtggcactatccggcaccgcaggcggagccctgaattccgccgttcaaacagttcaaaccgctaacaatgaaagtgacagccgtatcaaagccttacagggcaccaaggccgcccttagcggggtacaggcagtccaggcagcccgtctggccgacgctaaaggcggtgacgacaaagccaacaacaatctggtgggtgtcagcctctcctacggccgccagtcctcccggtcagaactgaaacaacaccagaccactcaacaccagcacggcgatatccgcattcagggcggccagttgcaggcgggcaaagacctgcaactcaatgccagccgggatatccagctctcatccagccagaacaccgaacagaccaccggcaaaaacagcagtcgcggcagctcactgggcgtcggtttcactgccggaccggggggcacgggaatcaatctctccgccagcaccaaccacggcaaaggccgtgaaagcggtaacggcgtcagccataatgaaactacgctggatgcggggcaaactgtcaccctcaacgccggccgggatgcctcgctcaaaggcgctcaggtcagcggcgaacagattactgccgacgtcaaacgccacctgacgctcagcagcgagcaggacagcaaccgctacgatatgaagcagcagaacgtcagtgccggtgtcagtgttactctcggtccacaaccgggcggctcattgaacctcagcgccagccgcgacaaaatccacagcaactttgactccgtacaggagcagaccggactgtttgccggcaaaggcggctatcaggtcaaagtgggggaacatactcagcttgatggcgcagtcattgccagtaccgcagacaaagacaaaaacaccctcgataccggcacactgggctttggcgatatcaaaaacaaagcggattttaaaaccgaacaccatagcgtgagtatcagcaccggcggttcagccggcggcatgttcctcagtaatctggcggccaataccctgggcggcgctaaccgggaaggccacgcccaaagcaccactcacgccgcggtcagcgacggtgccctgattatccgggataaagacaagcagcaacaggatgtcaccaccctgagccgggataccgaccatgctaacaatgccctcagccctatctttgacaaagagaaagagcagcaacggctgaaacaggcccaactgattggcgaaatcagtgcgcaggtgattgatatcgccagcaccgaaggggccattatcgccaccaaagcagccaacgccaaactggagaacatcagtgacccggatagagaagcggccataaaagtactgaaggataacggtaaaaccgacatcaccccggcgcttattaaagaccagatttacaagaccgcctataacgcggcattgaatgagtctggtctgggcaccggtgggaaataccacactgctttacaggcggctaccgcggccattcagggactcgcgggcggaaatatcggtcaggcactggcaggcggcgcttctccttatctggccggggtgattaaagacctgactaccgacccgaaaacccatgaagtcgatatcgtcaccaatactctggcccatgccattctgggggcagtagccgccgaagtcagtggcaacaatgcgctggcgggtgcggcaggcgcggcgggcggtgaactggctgcccgggaactgatgaagcatattcacggcgaaaatgctaaagtcagcgacttaagtgaagaggaaaaacagaccatcagcactctttctactttggcggccgggctggccggcggcattgccggtgactccaccgaaagcgccgttaccggggcccaagccgggaagaatgcggtggagaataatgccttaagcttgccaaaagggatgtcggattacggtcgggcacagagttcactggcaatgaagatgtacaaggaaggggcaacaccggatcagatatccgaagagctggcgaggcaagcacggggcacccatcccgaaggccaagatccagccagagggctgattgtagcgtgggggaacttcttcggtgttccgttggatgtggttatgtccaatgagaaaatgacgccggagaaagccgctgaaattgtgaccagcggcatcccgaccagtgaagcgaaggtgatgcagtatgtggcggctaaggcattcttggcactggctaaaaatcctgtttcgggtagcaaagcagaaggttcatcaccgcaatggaaagtaggagaagggaaatttagtccgaaggataagggcacagtgacgaatgttgagcatccggttggtaagtttgatggaaagtcactacctaatggaaaagaaaacattgcaagtgacaagacaatcaaaaatgacgtattagagcatcaaagggttggaagtggcgagaaaggaactgtagtggaaataaagtagatcaactacctaataaaactgttgttgatattgatgggaaagaaatatctgtttattcaaataagagtaagccaacagcgacacaagaatttccttcagtagctaaggctcatggtttcaatgatattgttgacaattatgctggcttagcaacacaaacgaaattgaaaaatggagccactctttatcaattgccaggaaaattaaatggggttgaaggacgatttgagtggatagtagatccaaaattaggtggtgtaagccatagaatgtttgttactggcggaacagtgaatggagtgccatcaaaaccatgatgaatgatatgtacttgttagctaaaaaaatggaattacttgattggggaatgatttttcttggagccaagggaaaccctgttggtcgtttatctgctcctaatataagtgagtttgcatgtaatgaattaacaaaacttgatctgtctgattcaattctggtcgaggtgtctgaagctgcattttgcacagaaatcaatcgtgaagtgatcgatagcttagaagtcatatgtgataaaaaaaatataaatatacagttatcagaaaggaaatggagatatgtcgctttatatatcctattactcaatgaattgcctgatgattatgtatatggtcttctcaaattaaacgagttttggaacctttggggagatagtgttgattcaccgaatatagtccaaggtgttggtaataatctttcaccgacagaatactattcggaagagaattaccacctattgatagaaaagcatcgtaactggttagatagagagattaagcaattgcaatagagttgatacagatcccagcctaagcgctgggatcttccctttagccgtcagttcttctcaacaagccggataatcaactgtccagcctcgctagtattggtgatcagttttaccatcggtaaggccaaacaaaaaaagcggattttaaaaccgaacaccataatgcgagtatcagcacaggtggctcagcctgatggatagaagagattagccactgttcaaacaagaactttcaaatgacagaaagaatagagcttattgagttgatttcaggattagatagttatcttgaaaatggctatgtaaatgcggattcatacgaagatccttctgatgatgcgatagattatttaggagaacttttattgaaagattctgaatgttgtttggatttttgtaaaaaaatcttagattcggatctttttaacaataattctgttaaatctactgctttagattttttgattttatcagaatctaattggtttgaggcttttagctatttgctcaataaagctgaaaaattatctactcctgaattggaaaaagcattgttttacttttattgcgcaaaaaacgatcctaaaccatatcctgttcctgaaggactttttaataaattgatagaaaggtaccaggtactaaaaactgaatctgatgcaaatttttgtcatctgcatgaaacatacaacgattttattaaagcttattcattgaaattttgattaattgtaaatcccgaccactgtgaaccgcctccccaaaagtaggatacccagcaagtaagggaaagttctgtatgaagaattgcagtaaacaattactcaaatttaagtgtaaagtcgcccaatattatctttctaccaccagatgagataactagatgattaataaaatcaaacagtttacactaaatcggctaataacacctgagtccgaaattctgccggattcaggaaatttaattttgagccgagttatcaaactgctgataattttttcaatatcgaataatacctcattacaccagcaagggtaaaaagcctagcagattaatcagccagaaaagtgatcaccgttggacaggtattttagcgttaacaaagcacgaaaaaagtttagaaaataaggatatgaattgattttaatcccagatcacattaaagacataaaaagcagcatagtttaaatcaaatcgtagactaaactgattaaaacagtgtaaagccgtttaatccagagtattttacagttttacataataaatgaaaaataataacactgtaattaaccagattcgtattctgttaaatcattcacttgaacttttttatgacagattatttaactggtttatggaaaaatttataccatttaaaaaaattattaaagtctgctcctttgggaaaatagattgtttgattaaattactcatatgatcatattccctcttttccagaaacatgaacattaacaaaaccaatttttttcttatttttcactgaaatatttatgatagacggcttttaagctactattaaaaatcatttttttaatctctggttttaatcggcataaggttttaaccgttatttttatcctttatacattttatttttactggctctgttttactggtaatcctgagtggtttttatcaatcagtcggtaaatagcctgacgatattaaagatatcccttgatgttttttccgataacccctcttttttttaaaaagcttaaatccgaccagattaaccgttttatctcttttttattgcattatttttatagcttacgccttaaaatgacggtgagaaaacatctcactttcagttcattaaaaaactttctctatcgtgctgattgttttttaacttgccattaatggttaatgggtttcgattaaatgtcattaactgccctgctaaaaagtgaattttattatgttaaatcaagctgttatataaatcctttaatctatccgcactcgtattttcaaatgattatggccgtaaataggccgtttttaatcactctataccttttacaaatctggcattaatggagtacctgtttttaccccttagctgactcatcaacgataaaaaggattttattatcactagaaaagatttaataaatggtatttacgttttatatcccctatttatcttacccattttcattaaatttgcattcattttgctcgtttctccttttcatgcatttgatttttcaggtttaaaaccaaagaaggtaatagattaaataatggtattaagatcaaagtccattttttaaatgatttttaaaatccggttaatcctgttaaatgttttgaatcagttcagggatacgtaaacactaaggttttttcaagagttaattgacctcttgaaaatcgttcattatgttttttcccctaatggcggcgcatttcataccagctctgatccagtatcgcgcgatttaatccggattttgccctgacgtggcgcccggggtgttcaaccatccccgccgctgattttgacaggtttttcacctttaagtcctcaatgacgatcatggcgtggttttcgctgatagtcatcgtgactttatgaaggtaatctttgcggatattgcgatacgggcatgtatgctctggattttgcgtttctacttttgccaattattcctctccagctttatgtcggcgggagtaccctttcgaaggaaaagatggcaccgtgacttttagcatggcctcagtgccgccgatataatccttccgctttttcagagaaaaccttttaatttccagctagttttcaatatatatcttagctattttctcaaataaagagcttttactgacctcccttaaccttaatatatcgttggtaaaagaacgtaggaaaatagatgtgatattttgttccatcgcatttatctgttttccctctttatccatagtcagaatattgtaaattaagttctcttttgcaatcgtttgattaggtgaattgcatggtgatacaaaatacaataaatcatctccccttggttgaagataaatatgttcatactggctattctgtttaggcgctaagtaatagggcaaaactgtttcaaaagcatcaattatattaccacgtttttctgccgataaataaattcgtgaattataaaattcaggttctatttcataattctcttcaagctcttttagaaaaattcttttaatatgcaatcctacaatcgcagaaaaaacattgcataaaaatttgctattttcttcaaatttatcaataaatccttttatgtcatattcctggtcggaaagataaaaaaagtgaactgctttacagaccgctggcaaaccccattcaaaataatgaggtttgtttttttcattatgaaaaatgctgtgtccattttttctcactaagctggtctgagcactcacccaaatgccattttggaccctgctacactgaatattcccccatccacagataaaaataataaagccttgcgatcagcaactctatctgcttgatattttgaactgttgctaccaaaaggcattgtattttcactttcagcaacccacaaaaacgggcctaatggtgcccatgatactgctttaataggtacaggggggcacagctcgctgttcgttccttgatttgtgcagattgacactggttttcagacgggtgctgtcagtacagagtacccgtccaccgaccaatctcttggcaatcgcttactcaacaatgttgtaaaaaatttgccggaagacctcgctgtgactgaaacgacgacgacatttctgactcagggttgaggaatcggggaccttctctgtcagtccgaggcgcagaaacccgtggtaagccacattaacctgaatttcctgtaccagacagcgttcactggaaataccaaataaaactagtccagtaacatcatcttgagcaacataactggatcgatagccggtcagccattattgtggcaatacaatgggactactaattcgcggataaattcgaaatcaatgacggcatcgacttgacggaccaaatgatttttaagggccagctcgtcaaacaagagcgtttctggtgagaaagtctggagagggggtgttcttaacatggccgcaaaccccgtttggtgaacggagcttaattaaagcaaattgcgggttgaaaaatcataactttgtcaataacctgactgtaacatattattaacatttattgtgatataaatcacaattaaaaagaaaataaaaagacactgtgaatattataaattatatagtgaggtgactttatgaaaagtcatttttaaaattaaatcgaggatataaacatgcaaaagaaaacatctgttgaaattgaggtcgaagttgaagataaagaaatgacctgcggttcatacaataaataaaaatattggcgtatggctaaccaatttggttggccatgttctacataaggaagcagacatgagaatagcatgtggttttaatcctaattttcttagcggtgaaatacacataccgagtaaagtatcgatgatagaattagggattactgcatacaatattttatcagttgcagaaaaaagaactccattcgaaagatacaatggaaaattctctcttcacatcgccagaagtgcaataacagaagatattcaatcaggctgtaactatattaataacattatgccacgaataatcaacacggaaaaaacaattagcattggttttcatttgtgtggaaatagaaaagataacattggtaaatatggttttactccccattatgaaagaagcaagaggaaagaaagaaatgctataaatttcttaaaaagggtttctcacacatatcagatagatacatggatagaaaattcaaacttttactctggtggaccaagtgagatctctaacgcgataataagcgcgaattacataagtaaagaaagtaattctaaacaaatagttgacctggctcatctaatcatcaattcagtaaatgcaaaagttgatcctcttatatttattggaatgatagattgggataatgtagtcgaggttcatctatcaggaataattgagggaaaggatggagcatttcatgatggacatccagagagaattcatcatattgtttgggattcttttgagaaaatagtttccagcaaattaatcaaaaaaaatttctatataaatattgagcacacagaaaattcttggttaaagaacttatctggttataataatgactttgaaaaattgaattcaatattattaaaaaataaagaaacaagtaaaccctcaaataccaacatgagcaattatgcgaaatcatacctatcaaaaactctgctagcagccataaaaaacaagaaggaaattgaaatcgctaagtcggaaaacattgagtcgcttatatctagttggatattaagtatagaagaaagtgaagtaaacctatgcctaacaaaagaagaggaagatgaaactataaattcagttcattatttaaaatcattcgaaagttttgtgaataggtgaatcatgaaaataggaaccaattggtcgggaaatagagaactaagcgttctaaaggagataatatcattaagaaaggtcgatttcatagagatattaatagataactttttgcagtgcactcctgactcaatacttggcataagcaaaggattaccgatagcgtttcatatcatgaactctaaatatatgcacagaagcaaacaagatttagagagtatagggaaaagaataaaattactccaaaaagaactaaaccccatatatatatctgatcatgttggtattttttatcataatagctatcctttaccaacaatgggtgaaatagattactcttctgaaaaagataaatacttcgattcagtaagcctttggcaagatataattggcgaaaaaatttatttagaaaacttcccttcaatacttgatgaaaacgccaagctacaaccagatttttttaaagaaatgacaaaaaaatgcggtaatggacttttgttcgacatatcaaatgctgtaattgcacaagaaaacacgggaaccccatttgaagaatggcttgatatagaaatgaaccatcttcacattggtggttatgcagaaacatcattacgccctagttttttggttgacactcatgcagatagaatatctaatctttcattaaagtattttaataaattgggaacagaaagtaaggacaatcttacatcactatctgttgaaagagatgataattttgtattaggagactggattaatgacatcgaattatgcagacaatagaaattgttactcttatgttgtaactggagaatccgcattagaactaccaaaaaacaaatcagactctctatctaagctcatgatttataacataactaatgtactaaacaaccctctgagcagatctaaagctgaagtttcttttgaagaagtagaagaatttatacgttgggcaaacaaaaggaaatatcatctcgattggagaatatttgcatactttttatctttcagacatgaaagtaaaaagcaccttacagatgagatgatgaatgatttattaatcttctcagcaagccaatggacttattttgataaaagcgagaaagaagagataataatatactccaagattaaagaaggatataagtttatagcaaaaaagtcaaaaaaagcgtcaattgcaagaaagttatacatagctaagattgatattatggataatggacatcatgatggaagaaaagaaattatatatatttgacaagggtattatattgccatcgataacaatgtttaagagtagaatgttaaatatggcaatgcaacttattattaccgcactaatatatcaattgtctacagacgatgccggattttttttactatcatcacagttggttcagatatttgttgttgcttcatgtacctttttcatcggcattaatataaaatcagacattaaaaataaaaactacacttacgaaaactacacttggcttctaataacagggacggtaataggcttattaataactctaatatctgtggtatcaatacattattacagtgaccatacagtaacgaaaaaaatagcatggatactatcaatcggaattataccattatgtatatattctgttaactgcgcaattctagagtctacaaaacaagaaaggtacatggtaaaagtcaactcattcagtatattaacaaatgtattcgccctgattgcattatacttatttactggtgatttaatattttctattgctcttgctatcagtatctcaagggcatacatggccatctcatcttcaatcccattaataaaatttataaaatggaaaaaagttgacttaccttacattaaagatattgtgaatataggaataaatgaggctttaacatctacatcattagtgatattgatgtctattttaataaggtttgtatcgacattaatttcaaacatagaattatcaaagttatttgtttacatgggggttatgaattatctatttgtcacgggcttttctgctgttatttcattggctgcaaattacagaagtgatgaaaacaattttttaaatatagctataggtaccaacttattttaccttattatcttttcaaccgtctcaccattaatcagtttgatggtattcaatacgctaacagaaacaatagatataataacttgtgcattagtcatattctttgacttgatttccttatctattattaacagaataaggagcaaatcaccaaattcaaaatctgtatatcttaaggtgattcccattaccaccatacttgtggtcacctctacattaattagcccgacatcattcgaaatcttattgatttttgtatgcagtaatatactgtatacgctaatttcattaatatggtactcgctatggaaaaagaaatctttatttttagagaagttaacgtagaagatgcaaacaatctcattgttttttttaatgatttggataacacatcggaatttatgttgcttgagccagaagaaagaaaaacaagcgttgaagaacaggcggatataataaaaggattcggaaaagacaggcaaatgttaatatgcgaagatagcaaaaacattgttggctttattgttatatctagaggggtgttcaataggaacaggcatctgggttctattgttcttggagtaaaaaaagaatatagaaataaaggcatagcaagaaccctactcaacaaagcgcaagattggtcacggaaaaatggagttagtagacttgaattaaccgttgcaataaaaaacacattggcaataaagctgtatttgtcatcaggttttattttttctggcatcagaactagctcactatttataaatggtgaactgacagatgaatactatatgactaaaggaatatctgaaacagtaatagacaatgtaacaaacaaccggtgattaagctaagattttttgtggaaggaacaatataccctatggatttcaagatggatcgcggcggcaagggagtgaatccccgggggcatagataacgatgtgaccggggtgagcgagtgcagccaacaaagaggcaacttgaaagaggacgggtatacctcacactttaataaattgggaaatctaaacgtctatacttcttaacatctaaaataaaactaatatattccttttagctatatatggttgctattcattctttcaaacaaatacatatacagcgttatcctccataactatctgaatacaacggattatctggatatgatatgaccacatcacgctctgttctcgatatgattggtaataccccattgctggagttaacgcatctgaataccggtccatgtcaattatttattaagctggagaatcaaaatcccggcggatctattaaagatcgcgttgctctttccatgatcgagcaggcggaagaacaagggttacttcaatctggtgggacaattatcgaagctactgctggtaataccggcatcgggttggcactggtcgctgccttgaaaggctataaattgattctggttgttccagataagatgagccgagagaaggtgtttcatctgcgtgctctgggtaccgatgtacgtcttactcgttctgatgtcagcaaaggtcatccagagtactatcaagattatgccctacgtctggcgcaagagatccccggtgcttattatatcgatcagttcaataatccggctaattcagcagcgcatactaccactaccggaccggaaatctggcagcaaatggaccacaatgtcgatgccgtggtgatcggtgtcgggtccggcggtacgctcggcggtttgagccactatttcgctcaagtttcgccggaaactgagtttgttctggcagatccaactggttctatcttggtagactatatcgaacacggcaaatatggtgaggccgggagttggcaggtggaaggtattggcgaagattttgtccctcctctgggcaatttcagtcgagtgcaccacgcataccgtgtcagtgatgcagaagctttctccagtgcccgtgatctgttgctaaaggaaggtgtgctggcgggttcttccagcggaaccttgctcgccgccgcactgcgctactgccgtgcgcaaaccacccccaaacgtgtggttacgctagcgtgtgacagcggaaacaagtatctgtcaaaaatgtttaacgattattggatgctggaacagggattccaatcacgtgtgcaacagcacgatctcagcgattatattacttaccgctatcaggatggcgctacggtttttatatcgccagaagatacgttaaaaactgcacatacccgaatgcgcttgtatgagatttctcaattaccggtgctgaaagaagagcaagtcgttggcattatcgacgagtgggatttgatgcacaccgtgcaggctgatccacgcaattttagcctgcccgttagccacgccatgactcatcaggtgagaacgctggataaaaacgattctctgcaacaattgatggcaactttcgacgccggacatgtggcgctgatcgtcgataatggccgttttcttgggctggtaactcgcacagatgtgctgaacgcatggcgtcagcaacttaattgatttttaggaatgactttatgaccaagttcgatactaaaactgttcacgccggctacacaccagatcacacgggtgcggtaatgccggcaatttatgcaacatcaacttacgcccaatcagcccccggtcaacacactggttatgaatattcccgtagtggcaacccaactcgtgatgctctggaaagcgcgatcgccgaactggaaaacggtagccgaggctacgcttttagttcagggctcgctgccagttccacggtgctagaactcttggataaggatagccatttggtggcagtcgatgatctgtacggtggtacctaccggctactcgaaaaagtacgtagccgcaccgccggtttgcgtgtcacttacgtggaagccaatgatatttccggccttgaagcagccattcgtcccgatacaaaaatgatttgggtggagactcctaccaatccgttgctgaaactggccgatctgacggctatcgcacaaatagcgcaacgtcacagtattattagtgttgcagataacactttcgcttcaccatatctccaacgcccagttgatttgggatttgatatcgtcgtgcactccgccactaaatatttaaacggccactctgatgtgatcgcaggactggccgtcgtcggaaaaaatgcagaactagcagaaaaacttggttttctgcaaaactctgtcggtggcgtgctcgatccctttagtagtttcctggtgctgcgcggaatgcggacacttgccctacgtatgcagcgccacattgatagtgcatcaaagatcgcacattggttggagcaacaacctcagatcgaaaccgttttctatcccggtctcgcttcccatccacagcatgaattggcgaagcgtcaaatgaaaggctttggtggtatgatttctgttcacttaaaaggtgatgatgattatgcccgccggttaattcaagagctaaaactatttaccctggcagaaagtctgggcggggtggagagcctgatcagccaaccattcagtatgactcacgcgtctattccattagaaaaacgccttgcttctgggatcacgccacagttggtacgcatttctgtgggtatagaggatgcagaggatcttatcgccgatttggctcaagcgttagaaaaagccgctcaataaaagaataatgccagccaattttttcaactggctggcatttaaataaaaacggctctttttatgcaatcaacagcaaatgtagaaccggaattatttatcacccaacagaacggattccagtgcgatttcaatcatttcattgaaagtcgtctggcgttcctcggcggtcagtttttcatgagtgcggatgtgatcagaaacggtacagatagtcagtgcttttgcgccatattcagccgcaacaccgtaaaaacccgcagcttccatttctacgcccaaaatgccatatttttccatgatatcgaacagttgtggatcaggtgtatagaacagttcaaccgagaagatgttacctacacgcacattgatgttttttgctttagccgcgtcaacagcattacggaccagatcgaaatcagcaatcgccgcaaaatcgtgatctttaaagcgtatacggttaactttggaatcagtacatgcccccatgccaataacgacatcacgcaatttaacatcgtgacgtactgaaccacaggaacctacacggataagaactttagcaccgaaatcggtgataagctctttcgcatagatagagcaggatggaatacccataccatgccccatcacagaaattgggcggcctttataagtaccagtaaaccccaacataccgcgtacatcgtttacctgccgcacattctccagaaaagtttcagcaatatatttcgcacgtaatggatcgcctggcatcagaacaacgtctgcaaaatcacccatctcagcattaatatgaggcgtggccataattaaattccttatttttttatttaatggttattttagtgatatatggctgcctaaaagaaaagcagccaaataagtggggtcagagcattgatttgccatattccattggcgacagttcaaaatatttagcgactgtctgtccaatatcagcaaaagtttcacggtgacccaatgaaccaggttgcacttttggtccataaatcagcaccggaatgtgctcacgtgtgtggtcagtaccagaccaggttggatcacaaccgtggtcggcggtcaggattaaaatgtcatcatttttcacccgcttcagcatttcaggcagacgacggtcaaacagttccaatgccgccgcataacccggaacatcacgacgatgaccataagaagagtcgaaatcgacaaagttagtgaatacgatggtgttgtcacccgctttttccatttccaccagcgttgcatcaaacaatgcatcaatgccggtcgctttcactttttgcgtaatgccgacgtttgcatagatatcggcaattttaccgatagaaacgacttcgccatttttctcatcgactaattttttcagtatggtgggagcaggtggctctaccgctaaatcatggcgattaccggtacgctggaagttacccgctttgtctccaacaaacggacgcgcaatcacccggccaatgttgtaaccgccatcagtcaattcttcacgggcgatttcacatagctcatacagacgatctaaaccgaatgtctcttcgtggcaagcaatctggaataccgaatcagcagaagtatagaaaatcggtttacccgttttcatatgctcttcacccagtttatccagaataaccgtaccagaagagtggcagttaccgagataacctggcagatttgcgcgttctaccagtttatccaacaatgcctgcggaaagctgttttcttcatctttgaagtaaccccagtcaaacagcaccgggacaccggcaatttcccaatgacctgacggtgtatctttaccggaagagagttcactggcgtaagcgtaagcaccaataatgtccgcgtctttatccaagccggcagggaaagttccacaggactcctcagtcgctttccccaaacctaaacggcttaagttcggcaaatacagaggccctttgcgaccgatatccgcatcaccacgggcacacgcttctgcaatgtgccccaaggtgttagatccttgatcaccaaatttttcggcatctttactggcaccaatgccaaaagaatccaataccatgatgaatgtacgtttcataattttctcctgcgtcaaatcacgctatacccgttatctttcaaattgcctctttgttggctgcactcactcaccccggttacatcgttcgctatgctcccggggattcactcccttgccgtcgcgatccatcttaaaatccatagggtattaatcatgattaaagccgttacgcgccgactgatgcggtgagcgattatcaataatggctgctttgtttttgcccctgatgacccagagtatttagcaaattgcctaacaagctagaagccccaaaacgaaaatgacgggcatcaacccatttgtcacccatgatatgatcagctaatgccagatattgtgcagcctcttcagcggtacgcacgccaccagccggtttgaagccaaccgtttcacccacgcccatctcatgaatcaccttcatcatgatttcagcacttgccaatgtcgcgttaaccggcactttacctgtagatgttttgataaaatcggcacccgcgttgattgaaatttcagatgccttacggatcagagatgcctctttcagttcaccagtttcaataataacttttagcagcacatccgcttctgcacaggcgactttacacgcttttaccatctcaaaaccgacttgttcattactggccatcaatgcacggtatgggaaaaccacatcgacctcatcagcgccataagcaatagccgcttgggtttcagctaaagcgatgtcaatatcgtcatgaccatgtgggaagtttgtcactgttgcaatgcggatttcaggtgtgccctgttcacgtaatactttacgtgccagaggaataaaacgagggtagatacagatagccgcagtattgcccgcgaggcttttcgcctgatgacaaagtgccgtcactttttcatcggtatcattatcattgagtgtcgttaaatccatcaaactcagcgcacgctgcgctgctgcggttaaatcggtcataaaactctccaacgttattatcgcggctagcttctgctagattatcaccaaataatacacgacaaaaaatatataccctatggatttcaagatgcattacggcggcaagggagcgaatccccgggagcatagataacgatgtgaccggggtgagtgagtgcagccaacaaagaggcaacttgaaagatgacgggtataactcacgtccaacaaacaatagagtataaagagtataaagacgctgcttcttcatcacgaattaaagataaaccggtaggacgatagattgcaggcgggattatcccacctgcctaatttcagcaacgttacagagccaggaagaagcctgcgatagttgcactcattaagttggataatgtgcccgcgataatggctttcattcccaaacgagcaacatctccgcggcggttcggtgccataccgcccagcccccctagcaggatagcaacggaagcaaggttagcaaagccacacaatgcgaaggagataattgctttagtatgatctgatagaacctgcaaacccgccgccataaccacatcatccggtttcaaataggcaccgaaattcataaaagcaacaaattcgttcacaactattttttgaccgatgaaagaacctgctaccgttgcttcattccacggaacaccaatcaggtaagcaattggcgcgaagacccaccccaacaccagttcaagagaaagttgtggataattaaaccaaccaccgattccaccgagaataccattcaacaatgcaatcagggcaacaaacgccaataacattgccccgacgttcaatgccaattgcataccagaagcagcaccagaggcggctgcatcaataatgttagcaggacgttcctcttcagcgaccagtgacattgcatcaacagtatcgcgtggcttttcagtttcaggcaccatcaatttcgcgaacaacaggccacctggtgccgccataaaggaagccgcaatcagatattccaaaggaacacccattgatgcataacccgccagtactgaacccgcaacggatgccagaccaccactcattaccgcaaacagttcagattgagtcatagtcgcaatataagggcgaacaaccagtggtgcctcagtttggcccacgaaaatattcgctgtcgcagacaaagattctgtacgtgaagttccgagaatcttttgcagccccccccccaagactttgataactagctgcataacaccaatgtagtacaacacagcaatcaatgaagagaagaaaacaataataggcagtacacgcagggcgaaaacaaatcccccaccaccaaacagttcaaacattttgggggaaactaatccaccaaaaataaaatccattccttgttgaccaaactggataacactagaaactccctcagacatacccattaatattttcttacctgcgggaacataaagtacaaaagcaccgatagcgatctgaatcaaaaaggcaccaaggacagtacggagtttaatagcgcgataattactggaaaagagtactgcgatcaaaatcagcactaccatcccgaccaagctcataaagagttgcattggaagaatccctgttcacttaataataaattaaatatgccagttgaacgtaaatcgttcactgacgatgagtcggcgctgattatactcagtcatcggaatgaacaagctattgacatcacaaatatctactgaaaaaagcaataaaaaaatgataaatgtgatgtgaatcacacaaatttgcggaaataatcttcaatagataatctaatctcggaatggcaaaataatcaacaattaagaaataattatcaggtaagcacagctaaaggacagaagatagaagatatgaagacatattatatgaaaataatgaaagccaatatgctagaagaacgcttgagagaatttttgaaacatcgactcgctcactctaatgataatgctcatgatattgggcatctgatccgtgttgcaaataacgcgaaaagaatcatggagaaagaaggaggtgagcctttaattatcattgcctcaagttacttacatgacattgtgtcattaccaaaagatcatccagaaaaaaaacagtcttcaaaacttgcagcacaggaagccgtaaaaattctatctattgaatttccagagttcccaaaagaactttatgatgcggtagaacacgccattataacccatagctacagcgcaaacttacctgccaaaacaatagaagctaaaatactccaagatgcagaccgattggatgcattaggagctattggactcgccagagtattttatatagcgggtatgctcggtcaggggctttttcatcatgatgatccctttgcacttaatcgccccttggatgacaaatcctatacaatcgatcactttcagacaaagttatttaaactccccgaaaaaatgaataccacagagggtaagaagattgcacaattgaatgcccaatatttggttgactttttgagcaaactgtcgagcgaaattaaaggtgatttaattaatacggatgaatttataaaggattttttcaaggaaaattaattgcaaatattataaccttggagctttaccaatagtcgttaaaatcactctgtaactgcctatcccaatagagctattttatttgcccttctttgccataaagagcgaacctgggcagtgctcaaaatcctcacgtactacgtgtacgctccggtttttccgcgctgtccgtgttcactgttcattgataagaatggtctgcaacaattacgcctattgagataggctctaaatcatataattaatccaaataactcaacactgttatgataaagttggcgagcaatctcatcaggagcttcgcggcggagctcacataacgaagcaaaaactccagcaattttttccggccggttaggttctccctgaaaaccgaaaagcggcatatctggagcatcggtttccagcaccagagacgttaacgggagttcagccattacgcgacgtgttttctgcgctctttcataagtaatggttccccctaccccaaggtaatatcccaaaccgataaaagcctccgcctgcgataagctacccgcaaatccgtgtactacaccggtacggtgaaggttgattcttcttaggatcgctgccagttgatcatggctttttcgggaatgaaggataaccggcagttcatactgttttgctaaccgcaattgatcgcataacaacgctttctgtttttcaaattggggttcagtcatatagagatcaagcccaatctccccaaccgccaccaacttttcgtgtttctgtttcagaaacgattccaaatccgcaagatgcgcttcctgatgttgatcgatataaagaggatgtaaacccaatgcagcataaattgcaggataagaacaagccaattcagatacctgttgcaaatttgcactactaatagcggggacaataattctatccacaccaacctgtgccgcccgttgcaggctctgctgttcatcatcacgaaacggagggaaatcaaaatggcagtgagtatcaataaacatgaaactatccgttatttatctgttctgacgatagaaaaattgagggcatactgaatatcaataccatttttgacggaaactgtgtagatatctatgccgataaggcgaggagccatcacccggtaaaagaccagaaatgccccgatcaattcaagtctgattattttcagtctgaaactgttacgaggtttctttaccgctatgattaaattaattttttattcctacattaataaaaattaagcttaacataataagctttcacgctataaagtcattcctccatcagttaacactcttaccaaatagtgaaaatgattctaaatacctaagatagatattgattgcgggtaatccagatcaagccgccgcttcaatagttgtaccactaaaactcacttattactcacactatcatgttttaaatagtggcaaactcaggtcaccgtttcccgtgatgaagtgatccgctatttcgatcaattaaatgctaaagatatgacggctgaaaatgcagcttcacttatcgccacattgcatgagatggataaaggtacgataacgcaagtgaataccttgctattaggagaaaataactggccgaaaagttttacatcactttggcaacgtctgacctggttacgtgtcggacaaagtttgaatgtcggtagtaccactctgagcaacctagatagccgttttttgccttttgaaggtcgaaaagcaacaaccggtacactggagctcaatattttccatgccggtaaagaaagaacgcaacgtgggctagttgccaatctgagtgacatcattgtgcatctgaattacatcattcgagacgcataaattttttttctttgtcgatcacaggtccctccctattaggggcctgttattaaggagtacttttatgcaggattcaccagaagtatcgattacaacgctgtcacttcccaaaggtggcggagctatcaatggcatgggagaagcgctaagtgctgccggccctgatggaatggccactctatctctgccgttgcccctttcgactggcagagggactgcgcctggattatcgctgctttacagcagtagtgcaggtaacgggcctttcggtatcggctggcaatgtggcgtcatgactattagccgacgcacccaacatggcattccacaatacggtaatgacgacacgttcttatctccacaaggcgaagtcatgaatattgccctaaataaccaagggcaaccagatatccgtcaagacgttaagacgctgcaaggcgtgaccttgccaatctcctataccgtgacccgctatcaagcccgccagatcgtggatttcagcagaatcgaatactggcaaccggcctccggtcaagaaggacgcgctttctggctgatatcgtcaccggacggccaactgcacatcttagggaaaaccgcacaggcttgtctggcaaatccgcaaaatgatcaacaaatcgcccagtggttgctggaagaaaccgtgacaccaaccggtgaacatgtcagttatcaataccgagccgaagatgaaacccattgtgacgacaatgaaaaaaccgctcaccccaatgctaccgcacagcgctatctggtacaggtgaactacggtaacatcaaaccgcaaaccagcctgttcgtactggataacacacctccgacaccggaagagtggctgtttcatctggtctttgaccacggtgaacgcgatacgtcacttcataccgtgccgaaatgggatgcaggtacagcacaatggcctgtacgccaggatatcttctctcgctatgaatacggttttgaagtacgtactcgccgcttatgccaacaagtactgatgtttcaccgtaccgcgctcatggccggagaagccggtaccagtgacgccccggaactggttggacgcttaatactggattacgatagaaatgccagcgtcaccacattgattgccgcccgccaattgagtcacgaaccggatggcagcccaatcactctgccaccattagagttggcctggcagcggttcaacctagagaagatgccaacatggcaacgttttgatgcactagataattttaactcgcagcaacgttatcaattggttgatctgcgaggagaagggttgccgggtatgctgtaccaagatcgcggtgcttggtggtataaagcgccgcaacgtcaggaagacggggatagtaatgccgtcacttacgacaaaatcgccccactgcctaccctacccagtttgcaggataatgcctcattgatggatatcaacggagacggccaactggattgggtaatcaccgcctccggtattcgcggataccatagccagcaacccgatggaaaatggacgcactttacgccaatcaatgccttgccagtagaatattttcacccaagcatccagttcgctgaccttaccggggcaggcttatccgatttagtgttgatcgggccgaaaagcgtgcgtctgtacgccaaccagcgaaacggctggcgtaaaggacaagatgtcccccaatccacaggtatcactctgccggttactggaaccgacgcccgcaaactggtggctttcagcgatatgctcggttccggtcaacagcacctagtggaaatcagggctaatcgcgtcacttgttggcctaatctgggacatggccgtttcggtcaaccactgaccctgccaggatttaaccagcccgaaactagcttcaatcccgaacggctgtttttggcggatatcgacggctccggcaccactgacattatctatgcgcaatccggctctttgctcatttatctcaaccaaagtggtaatcaatttgatgccccgctgacgttagctttgccagaaggtgtacaatttgacaatacttgccaactccaagtcgctgatattcaagggctagggatagccagtctgatcctgacagtgccacatatggcaccacatcactggcgttgcgatttgtcgctaaccaaaccttggttgctaaatgtgatgaacaataaccggggtgcacatcacactctacattatcgtagctccgcgcaattctggttggatgagaaattacaactcaccaaagcaggcaaatctccagcttgttacctgccgtttccaatgcatctgctgtggcataccgaaattcaggatgaaatcagcggtaaccggctcacgagtgcagtcagctacagccacggtgtttgggatggtaaagagcgggaattcagaggatttggttgcgtcaaacagacagataccacaacattttctcacggcaccgcccccgaacaggcggcaccgtcattgagcattagctggtttgccaccgggatagatgacgtagacagccaattagccacagaatattggcaggcagatactcaggcttatagcggatttgaaacccgttataccgtctgggataacgctaaccagacagatcaagcattcacccccaatgagacacaacgtaactggctgacgcgggcacttaaaggccaactgctacgcaccgagctctacggtctggacggaacggacagtcaaacggtgccttataccgtcagtgaatcacgctatcaggtacgctctattcccgtagagaaagaaaccgaattatctgcctgggtgactgccattgaaaatcgcagctaccactatgaacgtatcatcagtgatccacagctcagccagagtatccgactgcaacacgatatctttggtcaatcactgcaaagtgtcgatattgcctggccacgccgcgaaaaaccggcggtaaatccctacccacctaccctgccggaagcactattcgacagtagctatgatgaccagcaacaacgattacgtctggtgaggcaaaaaaatagctggcatcacctgactgacggagaaaactggcgattaggtttaccaaatgcacaacgccgtgatgtttatacttatgaccggaccaaaattccaaccgaagggatctctcttgaagtcttgctgaaagccgatggcctactagcagatgaaaaagcagccgtttatctggggcaacaacagacgttttacaccgccggtcaatcggaagtcacactagaaaagcccacgttacaggcgctggtagcgtttcaagaaaccgccatgatggacgatacctcattacaggcgtatgaaggggtgattgaagaacaggggttgaataccacactgacacaggccggttatcagcaagtcgcgcggttatttaataccggatcagaaagcccagtatgggtggcacggcaaggctataccgattaccgtgatgccacccagttctggcggcctcagactcagcgtaactcgttactaacagggaaaaccactctgacctgggatacccatcattgcgtaataattcagactcaggatgccgctggattaacgacgcaagcccgttacgattatcgtttccttacgccggtacaactgacagatattaatgataatcaacatattgtgacactggacgcgctaggtcgcgtgaccaccagccggttctggggtacggaggcaggacaagccacaggctattctaatcagccctttacaccaccggattccgtagataaagcgctagcgttaacaggagtactccccgttgcccaatgtttagtctatgccgttgatagctggatgccgttgttatctttgtctcagctttctcagtcaccagaagaggcagaagcgctatgggcgcaactgcgtgccgctcatatggttaccgaagatgggaaagtgtgcgcgctaggcgggaaacggggaataggccagcagaacctcacgattcaactcatctcgctattggcaagtattccccgtttacctccacatgtactggggatcaccactgatcgctacgataacgatccgcaacaacagcaccaacagaccgtgagttttagtgacggttttggccggttactccagagttcagtccgtcacgagcccggtgatgcctggcaacgtaaagaggacggtgggctggttgtggatgcaaatggtgctctggtcagtgccgctacagacacccgatgggccgtttccggtcgcacagaatatgacgataaaggccaaccggtacgtacttatcaaccctattttctgaataactggcgctacgttagtgatgacagcgcacgagatgacctgtttgccgatacccacctttatgatccactgggacgggaatacaaggtcatcaccgctaagaaatatttgcgagaaaaacagtacactccgtggtttatcgtcagtgaggatgaaaacgataccgcatcaagaaccccatagttttacctatttttatctgttgccccgcggtatattgcggggcagtatctatcaactttgaaaatttagcatttccgataagttccaccgttttgataatgcaaatcacctttaaaggaaacccacatatatacccgtcatctttcaagttgcctctttgttggctgcactcactcaccccggtcacatcgttatctatgctcccggggattcgttcccttgccgtcgcgatgcatcttgcaatccatagggtatatacttgcagaattaaaaatgaaatatcaacgtcaatgttatttcttaataaaagccggaacaggatcaggtgtcgggacagaactatcacaattataatgctctcctgtcagccctatttttttgcaagctgtagacaaaagatcattaggtgttgcccactcatctttccagttactaccgtcataacgttcattcttaaatagatcccacattatcagacccgttttaccatatttgatcgtaccatctaatatgctgttaagagcgctcttcgtcagcggtaaattaccggttgcgggtctaccaacttcaaatccaacggtaatcggcggcaaaaccaataatttttgcggttgaactgatgcctgagcgtaattacgtgcccctttcagtttgatatgaaaggtaacaacttcattgcccgatttaagccaattaatatattgcccataataatacttaacctgtccaggaaggtcacaaggaatatatgtttcacctcctccaataaatccacaatctttttcacttaaatcataggtcatcacaccaatataactgagtcggttgatcagactgggataactcagcgcggtattataaattaaaccatagagatttcctccccaccaagcaccaccataaatatcactattcctcgcattggttccccaattagcggacatattcgggatacctcccgttgcaggacctgcaatacttagcttaagtgatggtttaacggcattaattgaagtgtaaaaagattttaaaatagcggcgaatttatccacggttgcaggcattgcacggggaattttttctgcgccaggaacaatcttcattgacgcatcataaacataaccgccgagtccctttgctattaaagttgatgtaataagagtttcactgttattaaggggaaccttgattgagtcaggcgttaatttccagctttttgcattaatatcagcgtgccagaattcttcataatccacatcaattccctcgactcccaagttagcagccaaattgacaatatttctatatgccttatctgctgctttacccgtaatagtactgtcaaatcgaggaattttagtcaggggattagggaagatgtcataaaccgcaccgggttcattaccacaagcatcttttttgctggcagttatatcataaatttttggatcacaactaaagttccatccacctactgcaatataagtgctcacaccatgagattttaaatcagcaatcacaccttttaatgccataaaatcagctctagcattttcagcttctttgatgctaatactttgaccagaagtacaggtataaccaaacaatcctgaacatttcaggctatttttttcataattaacaaaaccaggctggacgaaagacaataccaacgtattaaagttactcttgttcttagagatatctctacttaattttttaaaattatcaaggctggcataatattcttgagtatccacctgtgcagcaggcccactcagataatatgcagatattttagggttggcggcaataacatttcctgatgtgaaaaaacataatatagaactcgctaataaatatcggtttaatttgtatttagacatatatctatctccacttggttaacattacttttccgattacagccaatgagttatcatgacgcctcattgccttttcatcatgaacggtataagtttttccctaatagagcgttaatatgctcagtctgttattatagactgtgatgtagttactgaactgttatatccgttatctttcaagttgcctctttgttggctgcactcccttgccgtcgcgattcatcttgaaatccatagggtatatatcagcattaattatttcaatgcaccaatttcataatagtatagttttcaccattgtccacaaaagagatagaaattagttgtaataatatttctctctaatctatctaaataaaaaacaatagggtatatgtgataattcctctagattatacctatgttaattaattaccgcttgtgcaaacctgcctatgaatgaacagtgaatacgaacaccggagtatacatgtcaatagaaaacccaccgctttaaataaacgccctctgttatcaggcaaattatgcccaaaaacttcaacgattcttcaacgaattataaaaaactataaaaaagcattatcttaaattgctgaattaatgatcaggcccgtatactcactgtgcgttaaaacaaatctggaatagcaagtagcttactgagtcgcgcaaaatgtattccagcaagtgaaacaaagttaaaacacaggaaaattatcatgacacgtttaggcttatccataactgtattatcactgttattctctggcgcggtattggctgcacctagcacacccgccccccaatcttcgaataccaaggcgacgtcttcccatatggaaaataccaaagcagagaagaaatctggcaaaaccgcccccaaacaacgctcacaccagaaggcaaaaagcaaagaagccaagaagaaggctcactgagttttccggcctaaaactactatttatgtccgcaattatgtccgcaatcgttatgacacaagtttagtcgtatcataactgtaaattcaggggggaaatccccccctcaacaggctatcgtgaaaagcttaacaagccccttcagtatcttcatcaccataatatttaacaccaatcctgatgatatcccgtccctgagatttacggtgtttattcgtgtcacgcaatgaatagatacaaccacaatattcctgctgataaaatctttcctgtttactaatttcaatcatccgagctgaaccaccttgtttacgccagttgtaatcccagtattgaatccccggatactgacttgccgctcgttttccacaatcatttatctgctgcatgtttttccagcgggaaatgcccaatgagcttgaaataatgctgaaattattttcataagcatacaaagcagtacgctcaaaacgcatatcaaagcacatggtgcagcgaacacctctttctggctccaattccatgcctttagcacgttcaaaccagttatcgctgtcataatccgcatcgacaaatggcacattgtgttgctccgcaaaacgaatgttctcttctttgcgaattaaatattcccgtttgggatgaatattcggattatagaaaaagacggtgtaatcaattccagaagcacgtagcgcttccatcacttcaccagaacaaggagcacaacaagagtgcaataataatcgttccgcattatccggtaacgttaaaacagggcgaacatagttttccatttagcaggctccatataattataagaattgattatagaatatagttatttttagcttcaaatttttcgaatgaaattcatcatgacttatttgcccttacgatccttaccttttcgatcacagtaaattacttgaaattctggcaggttctaccgtcatattgtcgtcatcaaagtttgtacgaggaagttcactaccgataaatctgttttacgctgatagttaactaaattatagccaaattcagatgcttttaaccaaaacaatttaaatggagaccaccatgcgccatacaatttctctgcgtgacctctcttttccggcaatcaccgccggatttgtcgctgttttagttggatataccagttcagcggcaattatctttcaggctgcggaagctgcgggcgccaccaccctacagatcggcggctggctgagtatgctagggcttgggatgggtatcagctccctggggctatcgctttattaccgcacccccgtccttaccgcatggtcaacaccgggcgcggcgctactggcgacaacgctaccaggaacatcaattaatgaagccattggtatctttatctttgcttcagcactgatcttgctgtgcggtattactggcctgtttgctcgattgatgaactatatcccacaggcactttccgccgctatgttagccggtattctattacgctttggtttagatgccttttcctcattttcagtcaacttcgtactgactgccggaatgtgtttaacttatcttctggcacgcagatatttatcccgctatgccatcatcttaacactattatcggggctgattatcgccgctttacagggaggtattcactttgaacaacaatccacagtcgcatttgttgcccctgaatttattgcgcccagtttcacactctcttcgttattgagtgtcggtattccatttttcatcgtcacgatggcatcccaaaacgcacccggcgtagccacactgaaagccgcagggtatccagtttctgtttcatcactgataagctggactgcgctcatttcactgatcttgtcaccttttggtggtttttccgtctgtattgccgccattacggcagcaatttgtatgagcccagaaatccacactgacccaaatcgccgctatatggccgctgccgtagcgggcgtgttttacctgatagcagggctgttcggtggttcaatcagtatgttattcagcgcgctaccggcagcacttattcatattattgccggattagcattgcttggaacaatttccggcagcctgctacaaacgctacagaatgaaaaacaacgggacgctgcggtaataacatttttaatcaccgcatctggcgtaacattacttggtgtaggcgctgcattctggggattaataggtggcgtaataaccatgctccttttatctttgcctgagaaaaacagaatagttcattagatgaacagtaaaattatacttttcagcactttatgatacttattatcaataaaacttatgatagtttgccgggtctgttgcgctttaaatattacgataggacatatctaacaaccttaaatcttcttacccgcaaaaccgagctttctattatgaaattttttgatatgaaattttctgatattagcaagttagctgttatttcatcctgcctggcaatcccttatagctatgctgatgatcgcccaattctttctctctctgttagccagtccggcggaaaccaaacgactgctgatggtagtttatccagaaaaccaaataagcaagaatcacgaatactcccaatttggggtgacgaggccagagctaaaggttatgacctaccggaaccttttggtgccagttacggttatatgaatatgcggcagaatatcattgtagacgatattaaaatcattataccgaataccccaggttttgaagatgtgctggatatccagacaggtaaaaccagagaaaagaatgagtcgcatatgctcaaactagatgcctgggttctaccttttctgaatgtttatggcgtttatggttggacaaaaggatcatcgaaaaccaacattgagggaatcagatttagtggtttccctattcctgatatgaaagatattcctttcaaattggactttaaaggtaaaacctatggtggcggttttactctagcaggaggttacgatcagtttttcggtacacttgatactaactatacctacactaatctagatattctggatggtaaaattagcgctctggttgttacaccacgtgttggttatgagtttatattccagccaatcatcccaggccaaggaaataccaaattgcaggtatggaccggtggtatgtaccagaaaattactcagaaatttgagggaaatattagtaatctggatttaccccccatgtttgataaattagtaagtgcattcgacgattatgaaagtatgaaattcaaagtaaaacagcatgttgcatcccgctggaataataccgttggtgcaaggctggaagtcacccgcaatttcaatctgctgactgaagttggctttaacaaacgtaatagctgctatatttcgggagagtttcgcttttaatgaatatccgctgtactttatatgggctggctttagtcagcctttttatttctgatttctcatatggcgaagcacgactcagcaggggaaaaatcgatggctggctagaaaaattaggtggcagtaatacctatgacagcagtaaagcgattgactggggcattttacccggccctttctacactccagagttaggtgctggtctcggtgttgctgtcattggtctctatcggccagataataatgatcataccagccaaatctcttctctttccctgaatggatttgcctcttcaacaggtgcctttggcttcacatttgataactacaatttctttgctgatgatcaatggcgtttttttctttccggtacattgaacaacgttcccacctactactggggtacaggatatcaagcaggtaagacagatgatcgcaaagaaaaatatcactcacaggaactgcacttgcaacccagagttctctatcgagttgctgattctacctatttaggcgctggctggaatttttcatcattacatgccaaagaccctgataacggtgctaaaaaactttttgcagcagaaaacgatggccggtccatattgagttcaggcgtcagtgcctatttcagctatgacactcgggattttctgcctaacgctcatcaaggacacgttcttgatattacctatacccatttttccccggcattaggcagtgaccgccggtttaataccgttgatatgcaatacagcacctattatcaattagatgaaaaatctgtactggcattcgatagttatggtcgtttcactgacggccaagtgccctggaatatgctgtcaatgctaggtaatagtcatcggatgcgcggatattatgaaggcagataccgggacaaaaatgttatcagcacccaattggaatatcggcacaaattggactggcgacatggctttgttctatgggctggggcgggcactctaagccattatgcaaaagatattggctcagaaaactggttacccaccgttggcgcaggctatcgttttgaattcaaacctaaaatgaatgtcaggctggattttggtatcggtaaaaaaagcaatggattttattttcaggtaggagaggcgttttgaaattgcgtttatggattactgctttaacgttagtcgcaggatgccaaggaactttttcttcaatcgcaccagtacaacctgacttaaatagtgaaacaaccgccgaagccacccgtgcatggccggttcttgctccgattccctctcccgaaggattaagagcttgctgtgcttttggctacaatttaaaaactgaattactgaccattccagtacctttttaccacataagtaatgtgctggatgccgataatcttggggcacataattataacaacagtttttttggtaccgttgcttcattaacagggctcagtaatgaaaaagtggggatgatatatacccgccgaggcggattcattgatatttcccatgtacgggataccgctgataatgcggtttttctgttcagtcaaatctggcctcgtcttggagaagagtggcaaatagaactcagcagcgaattagcattacgccgtatccaattctatcaattcacaccaccagcatcgatagaacaacgttataccttaactgcttatctagccgcaaaattggcttttgaacttgctgcatggcatgaaatcgcccaatggtacggttatcagtctgtaccgggattttctgaaaaagtatctgcgttctctcctgaagatctctactccaatctattaggcgctcgtctttccctctctttgatactggctgggcaagtaccgtcaatgaaacagtaccgtctatcaatgcaagctattctgcctcctgcactacgtgaactagaagccttatcccctgatgaaacacggaaaatgtttgaacaggttgatggtatctggtgggacagcaaacgtcgcgtgcctgataaacgtttaatccttcaacgtgatttccatactcacagcgatcgtacccctaatatggtgcctacagaacagcaagttccactcagacttaccctgccacaacaatatactggctacagattatctgaattggccgaattacaattgtggcctagccgccaaatgaaagatcttcctgtaccagaaagttattggattgctcttgattttccacaattggcagaaaaagcaaaagaacaacaagagaatcattgatgcatatattttctatgaaagaatgtatataacattatgagttaaaatatatgagagattttagattactatttctcaaacaataattcctttgtaatatcatcaattataatttactatttccataatgttacatcataatataaactcaacatcatctataataaaactaaactatgcccaccctacttaaattaatctataaagagaaagcctacatcaataaggaattatttcacaggataaaaaaatcgtattgaaatatttacaaagataaaacaccaataaacaactgatataaaataattaatattacataacatctaaaaaaacaaattaaaaaatcataagaatattaaccagcacaacaacaaaaaaagaaacaaaatatcaaaaagatcacaaaaacaagaatataattcttaattacactctcaatctgtgtattacacttatttttatcgaaaaattagactttcactcttaatttaacctaaataataaaaatcccttcttaaataggtttaatcgtctataatatacgtttccaagttataaatatgtataaacaatatcagctttatctaagtagataaaataagaacttgcattggcaacaattagatttattcaactaaaactcaagttactaaactattttcgaccatataatatattgatttttattttaaatttataatattaaatcaatttaatagataaatactcatattgtttttttaatttttctgatgtattgggggattcagggcccctatcttcacccccctgataaagccaattaagatgtccctactcctggagaggaaaaatgaataaactagcgttatcaaccaccgctgcgcttatttttgctacgggttctgctgttgcagccaatgatgctgccggcggtacattacatttctctggtgcagtcactgatgccacttgtactattaatggtggtgcttcagctaatctgtcgattatattggaaccgatctcagtcactcaagccggacaaaaagaaggcttaattgattttggtaagaaagcattttcactagaattttctaactgccagtccaaagccgttggttttgatccagcaacctctatgttgaaaatccagttctcatcatcacatactatttctaacgatgctaagtacctggttaaccaagaacttaatgcaaatggtaagccgaaaaacgtaggtatcgcgattgttaaacacgccgaagaaaataaccctattatgctgaataaagcgtttgatacaggaatcaaaggctctgagacaatacctgaagttgtcgatttctatgcgaaatattacaaagtaggcgctggtgatgcagatcacggtaaaatagtaacaatggttacttatcacgttacttatttataatgatttactacaataaataaagcctatttagataaataggcttatttaatttggcaaaaataacgttatgaagaaattatttttaactatattattagggataacgactttatctgctcatgctaacatcgttattaacacaacacgtgttatttacccagccagtaataaagaggtatcagttcaattattaaatgcaggggatcaaccctctctggtacaatcctggatagatgatggcgatcctaattcaacacctgaaacagctaaagtcccctttttactcacccctccagtcgtcaaaattgatggcaataacgggcaacaattaagaattaaatacatcagtaacaatctacccacggatcgtgaatcgctgttttatttaaatgttctggatattcctcccgttgcagaaaatattagtgataaaaacgttatgcaaatcgcaattcgtacccggatcaaatttttctaccggcctgataagctttctatcttacctaaacagatccaacaacatattgtattaaaacgtgagggtagccaactaaaattggaaaatgcatcaccctatttcatgagtattgtcggccttaaatcttctgacactcaacctaacttactcaatgaaggaacaattataaaaccgttctcttctcattcattcagtaccaatgaaaaagtaaaagttggagacaaattaactctggctattgttgatgattttggtgctataaataaattaactttaccacttcaatagtgatattactggcatagcatagaacatgataagacaaaaaattagtccgttagctctgataataagtacccttctgtatacagattgtttatgctatgccacaacatttaatactgactttctggttggtgaatcggcaaaagcggatttatcccgattttattccacttcagagctacccgctggtcgttatggtattgacatatatctgaataatgactggaaaggaagatttgatattaatatccagaacgatggcaaagatatttacttacttaatgaagatcttcccaggttaggtataaaaattgataaaaaccaattaccagaatcgaatttatccaaagatgaaattcttcttactaaaataatacatgaaggaaccgctaatctcgatgttcctaaactcagcctgcatctggtcgtcccgcaggcatatatcaaaaacgagctaaaaggctatatcgatcctgcgttctgggacagaggtatccccggcgctatgctgtcctacaatgccaactattaccatactcagaataggaataaacaaaaccgcgaccgtgaagatgaagataatgcttacgtgtcacttaatagcggtttgaatctatttggctggcaattacgtgatcaatcctcttatcactatacgcgttcaaatggtgataaatggagtaacaatacccgttatctgcaacgaggaatttcatcaattaattcagaatttcgcattggtgacagctatacatcaagcgatttattcgactctttccgcttccgaggtatcaatttgaaaaccgatatgcgcatgtaccccgatgcctggcaagggttttcccctatcgttcggggagttgcgcagactaatgctctggtaaaaatcacccaaaataatgttgttatttatcaaggtaatgtaccacccgggccgtttgctattgatactattttacccacaggttcaggtagtgatttgctagttgcagtgacggaagcagacgggcgtactaacagttttaccgttcccttttcatccgttcctaatatgatgaaagaaggtcttggcaaatatgatatcagtgcaggtaaaacacatattgccaacagtcgttataaaccaaacttttttcaagccagctatcaatatggttttaataatgtcctgaccggttatacaggtaccattatcagtaaagattattactcactactgctaggtagtggctttaatctacccattggcgctgtctcaattgacgtttcacagtccagcgccaaatttgataatagcccaaccatgaaagggcaaagctacaaattggcttatagccgttatatcccacaaacaaaaacaaatttctcgctggcggcttatcgttattcaactaaaaattatctcaccctaatcgatgcgattgatctgcatgactggataagcaatggatataaccaacaatattattctcatcaaaaaaatacctttaatatcaatttgaaccagaatcttggtagtcgtgcaggttcactttttctttcgggaacatttcgtaattactggggaacccagaataaaagtagagaatatcaaatggggtattccaatagtctggggaaaatcaattattccctgacagcaagccgtgtccgatacaatatcaatgaaacagaaagtaaagaggaacagcgctattatctgatgctgtctgttccttttgagttgtttggctaccctgcctatttgaccaataatgtctcaatcaatgaaagtcactatgacaacagtaacttaggattaagcggcagcgcaggcccaaacaaccgtttgaattaccacttcaacatttcagatcagaaaagtggttcgacaacaaccagtgcaaatttgacctacaaaacatccgtttccacactgagtagttcttatagccaatccaaggagtaccgccaaatgggacttggcgcaaccggcagtttagttgcttatcgaggcggaattctggcggctaatcaaattggggaaactttcgccatcattgacgcaccgggcacagcaaacgcttctgtgaatggtgataaaagcatggtgacaaacaccagcggtaagttgctgataccttatctttctccttatcgtaaaaatgccatcatgctagataccagtgaagtgccagaaggggccgctgaacttatcggtaacatcagagatgtcgcgccatattccggcgcgattacccatatcggatttaaaacagaccagcggaagacttttatcttctactccgctcaggctgatggtaaacctttacctttcggtactgaaattgtcgattcagaaggtaacagcttaggatacgttggtcagggtagtatggttttcctacgagtagaaaaattaccaccgcaaatttatgtccacatcggtcaactaggtgaaaagagctgcataataaatgatccacagcctgaaatgagctcaaacgccaatatttgccgttaagggagaagataatgaaacttaaaccatcatatcttaagccattgtatctggcggccataatcagtttgagcagtggcatagcctatgccgattgccaacccaaatatgcaataccggcaccggcaatcctggttgatatgacagatcatctcactctgaacagtaatgcaacctggatactcaacacccaatattctggctattttacatgcacaagaaattcactatggaaacaaaactcggttgctaacggttcgccttttaccaaaaacaaagttgttttaggattcaatggtggcaaaaattatgccgaagtgactatcacgaatctttctcctggcaacagtattaatctgggaaacagtaacgacacataccctgccagcaaattgcaagcccaatttacacttaatgtaaagctactgagtggcagacccggtggtagtaatattcacgtcttttccggcaattctgcaacattaaaaacggctgtaattgcgatggataccaccaacttaggactccttgatgccattctccgtttcgctaccgatttcctgacttttattcttacttgggagtggccgacacattctgaagatatctattatcaacccgtcacgatgatttttaatcacagagatacaacttgtcacttcttaaatgcggggttaacagtgaatctaccaaaagtcaaccgcattagattgcttaacggggcagataaaggagaaacgccttttaccctcaactttgaatgcaaatatctccaaaacggtaaaacttcacgctcagttaaagcttacctgagcagtaataatctgctaccaaatgacaatcgaactttaattgatagcaaagcaggtgccgctaaaggtgttggtatccgtgtttctcagacaagtgattcaacgccgataactttcagtgcttcgcaatcctcatcccaaggtgcaacactactattcagtaaaaactccggtaatgtcatcgataaacactttaccatcgaccttaatgcttactaccacgtttatgatccccaaaacatcatagcaggggaactgaaagcaacttctgtactgaactttgaatacaattaatcaagaggcaaagggaatgcctcttatttccctcattcgaattaaaattttatgtttcaatcagtaataatttgtaataaagtgtttctatagaaaaattcatttacatttataaccttccctgaatttacgtaacacaatgataatcctaacattaagtaattattcaaactcgcttaatttatcaacaaaatagtggaattctatgaaaaatagaaaaaaacatactttcacttatcaataaaattaaaaaaataatatcaagataatattttacaaccttattaaagaataaataaaaataacaaacaaccagaataaaaaatatattcaaaagagagtaatacaataaaaaaccacataaatagaaaaataaaacatatgaaaacattcaatcaccattgattgacaataaaaatatttcattaaaatcaatgatataaaaataaataacaaataaaaaccttagaaaaaaatataattacacgtaatataaaaatgtgaaaaataacttgaaatagcacaggaacaatataaattttattctccaaaaacacctttaatataaaaatagaaagataaatatttatattatccacaaataaattattaaaatttctttattcttatatacccctctattattatattcttacaatatcacccggagtaaatatttgtaacacattgttacttattttaacttaacatttataaccatatcgaatatcctgcaccgcaccaataacaatggctctattatgaaattagctcaaacctgacagatacgacttagttttaactcagagtaaagagaccatatcggtaacaggttacctttttatgaaaatgatacttattcttataacggcaatattaatatcaattagtttattactcgctgcggtgttcttacgattggcagtactataattaacagtactatataaaactaagttcaatcacttccgatattacactagctggtttacaaatcacttttcttttgataaagcgacttacaggcacaaaattaactcaaaaatcatgatcatatctgatgaataattcaatctagacaggcaatattttgtacacaaacagcacataaccatatagaaattaataaaaaaccacagaacaaattagcaaaataataatttttattacagaaaatatatttatgaatcactaataactctggctatgctggatttattttgctaatatcagcctgttttttattcagagcaaacgaggaaaagcaatgccctctcaaacaacgatgaggacaactgccatcttcgctttctttatctcactattgttttccgcttttagtcatgcttcaactagcacagctaaaagcatagagtattctcacaatgacatgcaaagcaatttgccagatttgcgaaaatacccttcgggcaccctacgtaagaaagcgtttttaaatgttgttgtccccgtgattgatcaacacaatcaacaaattatgcaggaacggaaatggctactggaacaccaaaatgacaagctttggtctatacagggtatcaaacgcctgcaacaaatttgtaaaaactacaacgtgagctgtagcagctcgcctaaaaaaattaactggaacaagctactaagtcgtgttgacatcatcccaacccattttgttgccactcaggccgcaacagaatctggttggggaacatctaagcttgcacaacagaataacaacttatttggtatgcgttgcggtaacaactgtaagaaaacccaaggtaaaataaaaggttattccgcctatccgactatcaatgattcggtcaaagcctatatgagaaatatgaacacccataacgcttatgaatcattgcgtgcttcacgcgccaagcagagaagccttcaggaatcactcaataccagcaaattgattgataatcttgaaggatattcacaattgggttcgacttacaacaactacctgcacaaagtatttaacagcaataaagggcttattactcaggcgcagaagttagctaaaaacgatcacgactaagagcctgagtaagtcattagcatgaatatcttgtgtttgaatatttgtgctaagtaccaaaatcatccgttaccataaccaactatggaacggatgattttcttatgtccaccggtttattcttttcattgatagaatgtttaggttaaatactataatatcactcaatcttatattgagataaaatgatttaccagagtttaatatgaatttcttttcttttgagtttcttggttcctttgttgctttctttctcttgtattggatgctacaaaaacatgcgaaaacacaaaactacctgctgataatcgcaagttatctgtttgtcttttcctttaatccgcttttcaccagcatcctatttggctatacgctatttatttatcttttaacaaacgtagccagcaaatttctatccaaccgcatcacgtttactatcctgacaataggtattttggggtgttttactctattcaaatattattctttctttcaagaaagtctccaacaagcgtttgccaaatttggtttgtccatagatttacccgtactaacactactcgtccctctgggtttatctttttatgcatttcattccgtcagctatgtcgttgctgtcgccagaaaagaaatacccaaagcatcatttcctgatgtcgctttatatctatgcttttttccgagtattgttgccggaccaataaaccgagctaaagattttctgcctcaaatccagatatcatcaagagtgatcattgaaccatcaagagccatattattgattacattggcgataaccaaactatttttgttcagctcttatttatccgaaaattatgttaatccggtttttgatgatcctgtcagctacaatgcagggcaaatcttggttagtatttatgcctatgcttggcatatctattttaatttttctggttataccaatcttgttactggattagcactactccttggattcagagtacctgaaaacttcaatgccccttatctggctgaaaacttacaagccttctggcaccgttggcatatcagtttatctgaatttatccgtgattatgtctatattcctcttggtggtaataagaaaggatttttacgtaaaaatcttaatttgtttgtcgctatggtaatctctgggttatggcatggagccggaattaatttcattatctggggagctattcatggattgggattaatcatcctcaatgttaaataccagttatttcctccaatagacaaaaaaaatcaaaacattccccaaaacccagtcatctcatttctatccagaatcattactttccactttatctgtctggcatgggttttcttccgttgtcctactctagatgatgcactaatattattaaatcaattgatatcatcaaatttatttcactcgataatagccaatagtgggttgttactgatgttctggggactctttattatttatccgtggctgattaatctaaaaataatggttgagaaaatgtattctcagatttcatggatatgctacccaataccattagcaattattctgactttggtatttatgatttcaccacaaggaataccaggattcatttatgccaatttctgaattcaaatctaatttaaaaacggctgggcaagtcatttttatcgtaatattaactagcctactgttaatttggctaaatcatcgttcactggatagattctggcaacaggaatatcaccggcaaagtctttgggcgactttgcaaggtcatccgctctgggatttcggtgataacctggaacaaggtgtactcgctgcgggggaagctttcctgtcacatactaccagcaataacagtaacaaccatcaggaaactctccagaaaactgatatcacactgcctgcggattttcagattggactcaagcttctgagtggttatccctctcctgttacaaatctgcctgcaactttccctgagttattacaaaaatcgccccatactcatcctgttaattcaccaataccccatgatttaaggaataatgtttcccccagtacggttatcgctaaaactaacgtgacactgacagccaaagataaggtgctgtttgctggagattcaatgatgcagggtatcgccccccatctgaaacgtcggctctaccaggattacagtatttcaagtattaatctcagcaaacaaagtactggacttgcttatcccagtttttttaattggccggaaactatcaataaaacactggaagccaaccatgatatcaagctggttgttatttttttggggccaaatgatccctgggatatgccaccaaaacatggaaacatctacctgaaatttgccagtcctgattgggaaaacctctatcgccaacgtatcgaaatggtccttaccgaagcacgtaaccacggtgctgatattatctgggttgctcctcccaatatgcgacagaaaaaactttctgccaacatgaaatatctgagatccttgtatcaatcagaagtcacgaaagccggagaaatctatgtttctgttaatgatattttcaaatatcatgcaaatgattattccgattatgtcggcgacaatagtaacaaaattaaactcagaagcggtgatggtatacactttagcctgaaaggccagcaaactatctcagataacatattttcattgattaaatttattcaggaacccgctaaacaaaatgaaaatagttaaacaacttcgtcggcgataccaagctgctagcattagtctggtcatcacactctctttaagtttgatatcgtgccataaacaaaagccagggccgttgccaacacaacagtctgcaaaagagggccaacagctaatagactttggtgaaccgaatttagctttactggcggataaacttcacaacagccgccataatcaactgcattttgttcagataggagattcccatactgccgctgacttttttaccggcaagctccgctctttattgcaacaacgttttggcaatgcagggattggttttgttagcccaattaatgtacctggtcaacgtaacgctatggtcagtatgaccgataataagcagcaatggaaactcaccaccagccgcaaagataatcggcctgattttcctatcggcggtacaattgcagagcccaatagccaaataagtcaattaattctaagactgtttgcaccatcccatgatcgctatcaactcaaaacgttataccaagcatcggatgatgctcagattctggtacaatctgcaaccaaacgaatactgaaattaccggcaacccacgatcactggcaattttctactgaagaatcagtgacattcccagttaatattatggcgatacaaaataatcagttaaaattaggcggctggtttattaatcgtaaacaaccaggtgttatgttatccgccttgggtatcaatggtgcgactattaatatgatggataagtggcagcccgaatggattgatacattagttcaaatgcatcctgatatgatgatcctcgcttatggcacaaatgaggcatttaatcattcgctggacttaccaagctatcgccagcaactggaaactaagataaagcagattcgtaatcagttaccacaaacagttatccttatcattgggccgggtgattctttgaaaaacaaccaatttacaagttgtatagcacaacaatcaacaatgttggataatatcatccatattcaacaaaaagtcgctcaagatcagcacacactattctggaactggcgtgcatatatgggtggaaaatgctcaattaggcgctgggcgcaacaagatcttgctcgtcctgattatgttcacctttcagccgcaggttatgagcgcagtgctgaagctttatatcaacagttaatagatgctctcggtcaataagcaacaataaggcttgactgggagtagtgctaaatacttctcttgtttttagtgcagaaaaattaaacttataatcttagatttacaatatgtatgagctcacacaaaacccatttgataaagacaaactatcttttttgctgtatttaatgcgttgaaaataagtttataccatgtgtaaaacatagcgttaaaaagagtatttaaaatatgatttttccaaaaaagtatcctctcagcacgataaaaaggctcatctccggctggaaagaatgtagtttcgaacgttaccaacaagcgtattctctctatggtggtggaatatctactcatccagatattgtacgttttttaaatgaaaaatttggcaatagttttatcttttacgtcaaagaaaatccacaaatagaaaacgttatcgaaggggcatactttacatgtaaagatcatcatctggcagcaagtcaccaaaaggactactattttttcagttacgatgaaattctcttccctattgccaaacatctaaaaactattatccctaggaagtcaaaaaccatatcacctctgcacaaagaaaacttcgtcaacatctattatggccgattaaacaagcgaacaatatgccttgctaaagaagatttttcttataaaacaagaagaaatcggagtaatgaaattaataaatttaagcgtgcaggcggagaaatacatcaaattgatgacttcacctgccaagaatttgttgatatttataccacactgtacgaaaaacggtggggaaaaaaacacagtgaagaagaaaaaggaaaattaaccgaactatacactgaactcaaacagcatctgtacggatgtgtattaactatcaatggaaccccagccgcctacgatttagttataaaatcagacagccctcaatgggtttcattcgatgcagtaaacggtggatacgatcctgaatacgctaatctcagccttggaagcattgtcatgtggttaaatattcaaaatgcttcaacgctctgtcagcagaatcaaaaaacgatgcgctattctattggtaaacctactttcgcctataaagatcgctggtgccatcgtcaccagttagcaagaacactattttaatgtcaccaatatttccaaatagttaacttatcctgccgccttctaaggaaggcggtactaatctaatacaatctcttaattcatatgaattacaacatggcaaagaaaaccattccaacaatggcacctattgtcccaagaatagtttccataattgaccaagttttcagtgtttgagattctgttgcaccagtaaatttaccaaataaccaaaagcctgagtcattaacatggctcaataccaaagaaccacccgcaatacaaattgaaagagcggcaagctgggcaccagaatatcccagaagatcaacaacgggcaaaatcagaccaacagttgtcaaacaggcaacagttgcagaaccttgaataacgcgtactgtaccagcaaggatgaaacacgctaatgcaataggcagacccgccccaatcaatgcgtttcccaaagcagggccaacaccagaatccactaatacttgtttgaatacaccaccagccccagtcaccaataaaataattcccgccggttgaatagccgaagagcaaatatccatcactttctctttactcatcccacgacgaattgccaaaccataaatagcaatcaaacaagcaaccaaaatcgcagaaaatggatgaccgataaattcaagccactgatacaactcagaactctgttcaacaaaattctcaccaatagcctttaacccaaccaaagccaaagggaacagaaccagtgacaaactcaaaccaaaagatggcatcttaccttgaccaaggcttggctcacttatatccacgggcaaatccagagtgacatacttactgataaaattaccgaagattggccccgccagtaacatcccaggaatcgctgcactgataccgatcaagatcatccagccaaaatcagcattcatctgtgaagccaacaacatcggcgctggaccaggtaacaaaaatgccgctgcggctgcgacaccagcaaacagaggaataaccaacttcactacattaccgccagtacgacgcgcgactgcgaacgccacgccaatcaataaaacaatagctacatcaaagaacaaaggcaaagcacaaaccaagccagcgatccccaatgaataatgagcattcttttcaccgaaactatttagtaacttaaccgcaatctgatccagtgcgcctgtttcatgcagaactttaccaaacatcgcgcccagtgcgacaacaatagccagaaaacctaacgttcctcccattccttcttgcattgtttcagcaattttatccagtggcataccagaaaaaacacccgctcccatagaaaccagtattagcgcaacaaaagcatgtattctggccttcatcaccaaaaacaatagtaaaagcacagaacccaccgctgtcagcactaaggttaaagtactcattatttttcccctgaaatgacactattaattattcttatcgagtgatttatcacttcatcaagagatgatctaatgtcaaccagataaacatcctgttcatcactccccggctcttctaatacctcaaactgagataccaacatttgagatttaaaaaaatgatctttacgtgccttcaatcgacttttaattaaatcaaagtcgcctttcatataaagaaatgaaagattcttattattatcacgcagtatatcccgataatgtttttttaaagcagagcaaacaatcagggaaatcgggtttgtgcgttgcatagcaaaaattgcatgattcagtgatttcaaccaaggttcacgatcttcatcattcagcgcgtagccttctgccatcttattaatgttagatcttggatgtaaaaaatcaccatctaaaaaagcagaatccaatttataggccacagcactggcaacagcagatttaccactaccggatacccccataagcacaaaaacatgattcgaatgctgggtatcgctcatataaactcctcaacgtagatattttatccacaaaatgttaccggtaactgttatcggtaacattatcagaagtagagatgaaattcgcaacaacacagaatattcaggaaatataaatgtgatatttatcacaaatgagttcaaaaaaacgcaaatccagcagaccgattagatactctctcccagagataactgaaaaccgatatcaattattttttgcggtaaatgttcgcccttcagccgagccattaataattcggcagccctccgccccaataagtcacgagacgtcaatacactggcaagttttggtgtcatcacctgaccaacatcatggccatgaaagccagctatcgcaatatcatgtggtacagctatcccttgacgttggcactcgaaaattgctccgattgcgaggtcatcgttagtgcagaatagaccatcaacatcaggatattttgttcgtgcttcattcagtaactgcccccctaatgtgtaagaagagctgtctggtgtcattatcttgcctggctttaacccggcgcttttcattgcagcttcatagccctccagacgaataattgtcctttcatcttgtctcgcaccaagataaatcaccctctggcaaccacgctcaatcattgcgattaccatctgccgagctgcttcaaaattgtcaataccaactgccatatcaaaacaaggagaaacacaatccatcagttcaacgacagggataccagccgttcccaacatcttcaaagttcgtggagtgtgagtacgttctgaaagaatcaaaccatcaatattataggaaagtaaagaaatcaaacgctcttcttctttttctgagcgataaccatagtgagccaacatagtttgataaccataactatccgtcacatattcgataccacgaataacctccgcaaaaacttggttagtcaaagaaggcaataaaataccaatagcatgactagtggaattagaaagaatatccggcactttatttgggatataacctagttcatctaaagcatccgctattttctttcgcaattgctcagaaacttgatcaggattacgcaagaaacgacttaccgtcattttagttataccaacacgatcagcaacatcttgtaaaataggacgttttttcttcatatttcaatgcaatatagaatgagtaaagtttagaatgataaacgtagtgctatgacatatttatacccgtcatctttcaagttgcttctttgttggctgcactcactcaccccggtcacatagttctctatgctcccggggattcgctcccttgccgccgcgatgcatcttgaaatccattgggtatatacactataaggatacatttttttaaaatttagtctggatgtgaaactgtaatcccaatttatttagtgtatcgtaaagtcttattctttagagtggagatataagacatattttttgtgactaagaggatttcgccgctaatatattaccgaatgatttagagcaatgagccaccacaaccagcaagaaccacactatgacaataagtaagagctcgaaaattgccaaacctatcaaaatcagaagcagggacattaagtcagcttaggagaaatgtccagaagaaattaaggtttaatcattcgatactggctcaaacttgatatgaactacgtcgtcaacttaagcaaagtagccatgcaattaggaaaaaactctcgttaacttatactaattaagaaaaagcggcgttattaaggtgctcaaaaccgatatcgaaaataacccattaaccgacatgcctatatcgcccaacggaacatatatagaaggttgaactcagctacggggagataaaacgtagacaatgaaatcatgcgtatacacttatcatcagcgtattgaaagcattcattaaaagtgacgaacgagcctcatttcctacaatttagttcgtctagcagctcatggtgtaagccctagtgcaaagtttttacgatgtgtaggacaaaatcccaaagaagtttcaccaattacgggaagaagaacaaattatatcatctaagaaaagcgggaaaaaattttcccaaagcaaattttatacagagggtgaaaaaacataccgctaaatacaaaatttccagctattaggcggtcagcatgataactttacaaatctcatcggcttataaacagctctttagccgttcactttgtgggccgtcgcgagtcgcgacgttcaaatccgatttccgacggagttgtcctatataatgcggatagacaggtcgcggtagacacggtaaccagataatataagcaaataaaatgatacagaccctgatatgcaaaaacccccagctttcgctgagggtttctacggtatttaaagcctggcagtgtcctactctcacatggggagaccccacactaccatcggcgctacggcgtttcactgctgagttcggcatggggtcaggtgggaccaccgcgctatcgccgccaggcatattcggttttcttccggccgttgtcgctcttccgccacaaccacccgaatcaatctctgaacaagctgaaaattcttctctcttctgtcttccgacaccaaaacaccttcggtgttgtaaggttaagcctctcggttcattagtactggtcagctcaatgcatcgctgcacttacacacccagcctatccacgtcttcgtcttaaacgttccttccgtgacctcagtcaggggaagactcatctcaaggcaagtttcccgcttagatgctttcagcggttatctctcccgcacttagctaccgggctatgccattggcatgacaacccgtacaccagcggtgcgtccactccggtcctctcgtactaggagcagcccctttcaatcttcctgcgcccacggcagatagggaccgaactgtctcacgacgttctaaacccagctcgcgtaccactttaaatggcgaacagccatacccttgggacctacttcagccccaggatgtgatgagccgacatcgaggtgccaaacaccgccgtcgatatgaactcttgggcggtatcagcctgttatccccggagtaccttttatccgttgagcgatggcccttccattcagaaccaccggatcactaagacctactttcgtacctgctcgaaccgtcactctcgcagttaagctggcttatgcctttgcactaacctcacgatgtccgaccgtgattagccaaccttcgtgctcctccgttacactttgggaggagaccgccccagtcaaactacccgccagacactgtccccggcccggtttacgggcccaggtgagaacatcgaacattcaagggtggtatttcaaggatggctccatgcagactggcgtccgcacttctcagcctcccacctatcctacacatcaaggctccatgttcagtgtcaagctatagtaaaggttcacggggtctttccgtcttgccgcggggacactgcatcttcacagcgagttcaatttcactgagtctcgggtggagacagcctggccatcattacgccattcgtgcaggtcggaacttacccgacaaggaatttcgctaccttaggaccgttatagttacggccgccgtttactggggcttctgtcaagagcctcgccttgcggctaaccccatcaattaaccttccagcaccgggcaggcgtcacaccgtatacgtccacttacgtgtttgcacagtgctgtgtttttaataaacagttgcagccagctggtctctgcgactggcttcagctccggaggcaaactccttcacctaccgccagcgtgccttctcccgaagttacggcaccattttgcctagttccttcacccgagttctctcaagcgcctgagtattctctacctgaccacctgtgtcggtttggggtacgattcaatatgacctgacgcttagaggcttttcctggaagccgggcatcaaccacttcaccgccgtagcggctcgtcatcacgcctcagtgttcacagaagagcggatttccctgctcctcccacctacacgcttaaaccgggacaaccgtcgcccggatggcctagccttctccgtccccccttcgcagtcacattcagtacaggaatattaacctgtttcccatcagctacgcctctcggcctcaccttaggggtcgactcaccctgccccgattaacgttggacaggaacccttggtcttccggcgagcgggtttttcacccgctttatcgttacttatgtcagcattcgcacttctgatacctccagcaggcctcacagctcaccttctccggcttacagaacgctcccctacccaataacacttgcgtgtcactgccgcagcttcggtgcatggtttagccccgttacatcttccgcgcaggccgactcgaccagtgagctattacgctttctttcaatgatggctgcttctaagccaacatcctggctgtctgggccttcccacatcgtttcccacttaaccatgacttcgggaccttagctggcggtctgggttgtttccctcttcacgacggacgttagcacccgccgtgtgtctcccgtgataccattcttcggtattcgcagtttgcatcgggttggtaagccgggatggccccctagccgaaacagtgctctacccccgaagatgaattcacgaggcgctacctaaatagctttcggggagaaccagctatctcccggtttgattggcctttcacccccagccacaggtcatccgctaatttttcaacattagtcggttcggtcctccagttagtgttacccaaccttcaacctgcccatggctagctcaccgggtttcgggtctataccctgcaactctttcgcccagttaagactcggtttccctgcggctcccctatccggttaaccttgctacagaatataagtcgctgacccattatacaaaaggtacgcagtcaccctgattaatcacggctcccactgcttgtacgtacacggtttcaggttctctttcactcccctcgccggggttcttttcgcctttccctcacggtactggttcactatcggtcagtcaggagtatttagccttggaggatggtccccccatcttcagacaggatttctcgtgtcccgccttactcatcgaactcacagccataccatcttcgagtacggggctgtcaccctctctcgccggcctttccagaccgttcctctgatgctatcgctgatgcaggttctgggctcctccccgttcgctcgccgctactgggggaatctcggttgatttcttttcctcggggtactgagatgtttcagttcccccggttcgcctcattaacctatgaattcagttaatgatagtgcaacgcattgcactgggtttccccattcggacatcgccggctattacgcttcatatcagcttaccgacgcttttcgcagattagcacgtccttcatcgcctctgactgcctaggcatccaccgtgtacgcttagtcgcttaacctcacaacccgaaactgtctcggactgttcagcttgagagacacctcaacaatacctcggcgatattattgagtatttcaatttttcagcttgttccagattgttaaagagcatctatcgctaaacagattcgcttaaatccgcttaaagataacctgacaacgcctttcacccgtcatcccgcaatatggcgtcccctaggggattcgaacccctgttaccgccgtgaaagggcggtgtcctaggcctctagacgaaggggacccgcaggtcagcttcgcagactcatttgcactctattttcatcagacaatctgtgtgagcactgcactcaacctctctcaggtaaggaggtgatccaaccgcaggttcccctacggttaccttgttacgacttcaccccagtcatgagccacaaagtggtcagcgcccccctttcggttaagctaccgacttcttttgcaacccactcccatggtgtgacgggcggtgtgtacaaggcccgggaacgtattcaccgtagcatgctgatctacgattactagcgattccgacttcatggagtcgagttgcagactccaatccggactacgacagactttgtgtgttccgcttgctctcgcgaggtcgcttcactttgtatccgccattgtagcacgtgtgtagccctactcgtaagggccatgatgacttgacgtcatccccaccttcctccggtttatcaccggcagtctcctttgagttcccaccttcacgtgctggcaacaaaggataagggttgcgctcgttgcgggacttaacccaacatttcacaacacgagctgacgacagccatgcagcacctgtctctcagttccctaaggcacttcgctgtctccagcaaattctgaggatgtcaagagtaggtaaggttcttcgcgttgcatcgaattaaaccacatgctccaccgcttgtgcgggcccccgtcaattcatttgagttttaaccttgcggccgtactccccaggcggtcgatttaacgcgttagcttcggaagccaccgttcaagaccgcaacctccaaatcgacatcgtttacagcgtggactaccagggtatctaatcctgtttgctccccacgctttcgcacctgagcgtcagtcttcgtccagggggccgccttcgccaccggtattcctccacatctctacgcatttcaccgctacacatggaattctacccccctctacgagactccagtcaaccagtcttagatgccattcccaggttgagcccggggatttcacatctaacttaattgaccgcctgcgtgcgctttacgcccagtcattccgattaacgcttgcaccctccgtattaccgcggctgctggcacggagttagccggtgcttcttctgcgggtaacgtcaaagtccagccctcttcaggctaaacccttcctccccgctgaaagtactttacaacccgaaggccttcttcatacacgcggcatggctgcatcaggcttgcgcccattgtgcaatattccccactgctgcctcccgtaggagtctgggccgtgtctcagtcccagtgtggctggtcatcctctcagaccagctagagatcgtcgcctaggtaggccattaccctacctaccagctaatcccatctgggttcatccgacggcgtgaggccctttcaggtcccccactttggtctcgcgacattatgcggtattagccaccgtttccagtggttatcccccgccctcgggcagatccccagacattactcacccgtccgccgctcgtcagcaaaagtgcaggcactttcctgttaccgctcgacttgcatgtgttaggcctgccgccagcgttcaatctgagccatgatcaaactcttcaatttaaagtttgatgctcaaagaattctgactaattatttcgtaatgaattaactgttgttcactcttcaagactttaaaacgtatttttttgtgatacggtcttgtgagtgcccacacagattgtctgattaattgttaaagagcaggctgacataaaaaataacattctcgttcagccgggctgcgtatactacgctgttcgcccgcagagtcaagcgcttattgcgccggttctctgcccgacctcacaatgtttatcagcgttgtgtcggtcagtggtggcgcattatagggaattctttgacgctggcaataattattttgaaaaaaattgatcgtttgattaattccacagcaaagctctactttatacctacttaccaacagatttatccacatatggctagttggatgaaaatttatcgagcatcacgcaaacgttttcgttacaattcggtggttaaaatcatcaagcgattttatctgactatactgaaatgttattgcagtgcccattttttatgtcctggtatataccctatggatttcaagatgcatcgcgacggcaaggaagcgaatccccgggagcatagcgaacgatgtgaccggggtgagcgagtgcagccaacaaagaggtaacttgaaagataacgggtgtagtgggttcttcccaataacatgttactgccttacaaaatccaagggatcaaatcaatgcaacagcttcgtccaatccatcgtgccctgcttagcgtttccgataaatcaggggttgttgaatttgcaaaagccttatctcaacgcggtgtcgaattgctttctactggtggcacagcgcgtttactcgctgagtcagatctaaaggttactgaagtttcagactacaccggttttcctgaaatgatggatggccgtgttaagacgctgcatcctaaagtacatggcggaatccttggccgccgcggacaagatgatgaaatcatggcacaacaccaaatctcaccgatcgatatggtggttgtgaatctatatccattcgctcagaccgtagctaaaccagattgtactttggcagatgccgttgaaaacattgatatcggtggtccaactatggttcgctctgcggctaagaaccataaagatgtagcgattgtggtaaatagtaaggattacaaaaaaatcattgaagagatggataacaatcaggggtcattaacacaatcaacccgcttcgatttagccattaaggcttttgaacacaccgcggcttatgacagcatgattgctaactattttggcaagctggttcctccttatcatggtgatacgactcaaccatcaggacgtttccctcgtactctgaatttgaatttcattaaaaagcaggatatgcgttacggtgagaacagccaccaagatgctgcattctatatagaagagaatctttctgaatcatccattgcaactgcaactcagttacaaggtaaggctctttcctataataacattgctgataccgatgcagcgctggaatgtgttaaggaattcgtggagcctgcatgcgttattgttaagcacgctaacccatgcggtgtagccattggtaaagatatccacgaagcttatgatagcgcattcaaaacagatccaacctccgctttcggcggtattattgctttcaaccgcgaacttgatattaaaactgcacaagccattatcgaccgtcaattcgtcgaggtaattattgccccctcagtaaataaagatgtcttacctgtgctggcaaccaagcaaaatatccgcgttctggtatgtggtgaatgggaggaccgggctgctggccttgattttaaacgagttaatggtggcttactggtacaagatcgcgatcttggtatggttgcagtaactaacctacgtgtggtttccaaacgtcatcccaccgaacaagaaatgaaagatgctctgttctgctggaaggtcgctaagtttgtcaaatctaatgccattgtttatgcaaaaaatgatatgaccattggtattggtgctggccaaatgagccgtgtctattccgcaaaaattgcggggattaaagcagccgatgaaggcttggaagtccaaggatgcgcaatggcgtctgacgcctttttcccatttcgtgacggcattgatgccgctgcggctgtcggcgtaagttgcattatccaacccggcggttcaatccgtgacgacgaagtaattaccgcggctgatgaacacggtattgctatgattttcaccggcatgcgccattttcgccactaatcaatagcaggagttaatctgatgaatattttaattgttggtagcggtggacgcgaacatgcgctggcatggaaagcagctcaatctcctttagctgataaaatctatgtcgctccaggaaatgcaggaactgctctggaaagcaatcttgaaaatattgatatctcagcgacagatatcaacggcttgttagtatttgcacaaagccatgatattgggctgactatcgtcggccctgaagtaccattagtgttaggtatcgtcgatgcattccaaacagcagggttgactatttttggtccaactcaggcagccgctcaattagaaggttcaaaagcatttaccaaagattttctagcacgtcatcaaatcccaactgcggcttatcagaattttacagctatcgaacccgctcttgcctacctagataaagtcggcgttcctattgttataaaagctgacggattggctgcgggtaaaggtgtgattgttgcgataacacgggaagaagcccagtccgccataaaagatatgctagccggaaatgcgtttggtgatgcaggccatcgtattgttattgaagagtttctaacaggtgaagaagctagttttatcgttatggtcgacggtaagaatgttattccgatggcaaccagtcaggatcataaacgcataggtgatggtgactccggcccaaacactggcggaatgggagcctattctcccgcaccagtcgtcaccaatgaaatccaccaacgcattatggaagagattatttatcctactgttaatggtatggctgctgagggtcatgtctatacgggttttctttatgccggcttgatgatcagccaaaatggcgaacccaaagtgattgaatttaactgtcgctttggtgatccagaaacacaacccatcatgatgcgtatgcgctccgatcttgttgaactctgtctagctggtgcaaaaggcgagcttgcgggtaaaacgtctgattgggatgagcgccctgctctgggtgtggtactcgctgccggagggtatcctgctgattatcacaaaggggatatcattcatggcttgccccaacaagaaaatgaaagtagcaaggttttccatgctggtacagcaatgaaagacaatgatgttattaccgccggtggacgcgttctgtgtgttacagcattaggagaaaccattatagatgcacagaaaaatgcttaccaacaagcagaagagattgaatggaataactgtttttaccgcaaggatatcggatatcgggcaattaaccgattgaaataatcataaaactgacgagggtcagagactgtccttcgtcggttcccaacgacaaaagtcattattagctaccaacaataattcgcggccagcaggcgcttccaaccaagcaatagttaactggctgtagctacttttttcgcgctgttcaagccatgacctcgcgtaaggttcaaactcaagggaaatcgtttcacctgcacaggtagtgactttaccgttattccagtgcccttgcaccaaacgcacatttcccactatcaacgcatcacttaattcaagcgtccgtttagcatcaaactgcatacgaacaatatcatcgctggaaagtcgctctcgtcgcgttttcgactgcttttgcataaaaatcacatcaccggatttattcaaacgaagttgttcagatagtggatttttatcattcaaaatttcacggcgaatttggcgcaaatctccctgcttatattcataaaaagtcacgacggtattgtcattacggtaggggctgtaaacactcatcagcacccgaggtttactgttctgatcgttgagacgccacaagcggacaacaccatcatcggcaatgaatccacttgcgctgaaagaaggttctttaggttgattggtacaggcgctgagcgcgaagacgaatcctagtgtcatcagcccctgacgaaccaacaaaaggggataaataataccccttctattttttcttttttgcaatgaaattatttaactgcgtctttcagagccttaccagcagagaaagcaggtacgtttgcagccgcgatggtaatttctttaccggtttgcgggttacgaccagtacgttctgcacggtggttaactttaaaagtaccaaaacctaccagttgtactgaatcgcccgcttttagggattcggtgattgcattcaaagttgattccagagcagcttttgcctgagctttagtcagttctgtgctttctgcgattgcatcaactaattcagtcttattcatagattatccttacagtgtgtttatcgtttgcaaagcatcgagtgcgacggatatgccgaatgacagcacccctgcatacacgcaccgatagccacttcttttcaccccccaaatgtagaacagagtgggggcaaaagtgaagtctttgaacatggcatttaaagcattaaatcacgttttttcactttactgcgttaaatttataccaatgttgctcgttcctgactcccggaggtcagctttcaatcctttaatcaactcaatatcccgctcttcgcagctaaccaataagcgataaatttcccattggatgtcccactcttgttcaatagccggtaatattttcagttcttcatcagtcatttcttttccggcctgagtcatttcaagcatagcaacagtgcggattgaaatttcactcactgcaattgcatgctccaatgtttcaccactcagacgggagtgaataatttcccctaatgcaatacatgcatcaatcgccgggtacacaccgtaaatatcgtaatcatccgctgagggaataatttgttccaacttttccagctgattatcaaaattcaccttggcatcttttacaactaatatttcccacaccaaatccagaatacggcggtaaagagcaggttctgcaaatgccgtctggcaacagaacatctggtaatttggatacatccgttcgcataaacttgccataaaggtcagatgctgccagctttcaagtttttccagccgtaaatgtatcgggttccgtaacattagcttttactcattatgcacaatttgctccgcagtttacctgaaattcaagaatatccacacgcttacaccgaatttaaggatttttctgtatcatttgttcaaaaaatggtctatttgaggctataccatctgcccaacgggttgtttcaggcaagcgataacctttcatacaacgttccacccatagcaatgcgctatcaagactgattctgtgtcctgtagaaatatacaacggattacaacgttttttacttcgccatacccaaccaatctgttcctctttatcaagcaaaggttggcaactgccgggctgttctcccaatagttcactttcaccacataaacgacgttttgccacaccaattgtgggcacattagctaataaaccaaaatggctagctacacctaaacgacgtggatgagcaatgccatgaccgtccaccatgactagatcaggtttgtatttcaacaactgccaagcagccattaatgcaggatattcacggaaagagagtaaaccgggaatataaggcaacgtagtttcaattcgcgctatctgatattccaccagttcaagagcaggataagagagaaccgctatcgctgcacgggtaattgctccctgtcgttcgaaacccacatcagcacccgcaatcaatttaggtggggaaaaatcatcataacagataacctgttgagcctttgctatttgttcctgacgtaatgctttcgtattaatcatatttttactgatgatatttagctgaaagtttatgtaccgcttcgacaaatacccccgcgtgttccggcagtatatcctgatggataccatgaccaaggttaaagacatgaccagaacccgtcccaaaaccttgcaaaattgtcgaaacttcctgctcaatccgctctggagaggcgtataacatagatgggtccatattaccctgcaaagcgactttattccccacacgacggcgtgcatcggcaatatctgtcgtccagtccaaaccaagcgcatcacaaccggtttcagccattgcttccagccattgtccaccacctttagcaaacagtgtcactggcacacgacgaccttcattttcacggatcagaccatcaacaattttgtgcatataatgtaaggaaaattcccgataatcccgccccgtcagtactccaccccaagtatcgaaaaccatcacagactgagcacctgctttaatctgagcattgagataaagaataacgctgtctgctagcttatccagcaacagatgcatcacggtaggttcggcatacatcatttttttaattttagtgaatgccttgctgctaccaccttccaccatgtaagttgccagtgtccacgggctaccagaaaagccgatcaaaggaacctggcccgcgagtgccttacgaatcgcacgcacggcatccgtcacatagctcaactccatttccggatcaggcactggcagtttttccacatcagcacggctgaaaaccggagatttaaaacgcggaccttcaccggcttcaaaatagagtcccaaccccatagcatcaggaatagtgagaatatcagagaagagaattgccgcatccagcggataacgctgcaaaggttgtaaagtgacttcacaagcgagctcagtgtttttacacaaagcaataaaatcaccggctttagcacgagtagcctgatactcaggtaaatagcggccagcctggcgcatcatccaaacaggggtaacatcaacagattggcgtaataaagctcgcaaataacgatcgtttttcagcgcattcatgacaggctccatctatatttattggccgcaacataatctgactacaatgaattagaacctcattgtaacatgataggtaaatctctcccgttgaattgcgccaaactgtacatcacgtatttcggcatagaacaatcgtatcttcaatcaaccgacgggcaatagtattatgtggtggaatcaatggtaattgatcatagtgataccaatccgcactaatcagctcttgcggatcatggcggatctcaccactgtcataatcagccagaaatgccatcattaatgaatgagggaaaggccacggttgagaagccacataacgtaaattgcgaattttaatattactctcttccatcacttcgcggacaacagcttcttcgagtgtttcaccgacttcaacaaatcccgccaatactgtgtacacccctccacgatggtgctgatgttgagccagcaaaatatgatcatcccgacgaataccgacaataatacaaggtgcaatctgcggataataacgttcatggcagtgatgacacagacaagcccattcactgacactatggtgcatttcattaccacaataaccacaatattgatgagagcgataaaactctgccaattgcactcctcggccagctaattgaaacaagccacgatcacttgcaacaatttgccgtaaagaaaccatatttgaaaccattttctgacggataagccaaactttttcgccttgccactcaccaataggcaaggctatttttccttgcagtgaccattgagttgccattccaaaaggtaactcacctttcgggagccaaatacgattttcattgctgataatccaccagccatgttctgtacctgtaatttgttgttgcatcatcatcactatgacatcttaattttaatatctgtatatacccgtcatctttcaagttgcctctttgttggctgcactcgctcaccccggtcacatcgttacctatgctcccggggattcactcccttgccgtcgcaatccatcttgaaatccatagggtataaatcatacgctttctaatcagaaaagcgtgctttattactattgtcatagaccatattgcccgatctggcagtaataggcattattctcaacgattaaatagactttgatctgaggagcacaacaccatgtctcaattgcttgccgtgtttgatctggatgacaccttaatttccggtgattccagcgctatatggaccacgtttttatgggaaaaaggtgtcattactgatccaacttttatcgaagcagataaaaaaatgatggctgattacagcgcgggttcactggatatgaatgattatctggcatttagcctgcaaaccttgcaccaagttccacaagaacaagttgatctttggctgactgaatttgttaacgaaaaaataagacctcgattttatccgcaagctaaagctcttattgcagagtatcaacagcaacaaatcccaattatgatcatctcagccacagtctcttttattgtaaaaaagattgctaccgaattgaatattcacacggcactgggcattgatatggtaatagaaaatggctgttataccggtaaaatagatggaattgcgacttttcgtgaaggtaaagtaaaacggataaaacagtggctggaacagaaaaatagttatcccaaaattattcgcttttacagtgattcaattaatgatctcccaatgtgtcaatttgccgatgaggtaattacggtcaatgctgatgcccatttaaaaaccgaagcacaacaacatggctggcaacaattaacctggtcactgtaaatactttcaatcagtaggggttgtagttttcataatcccttctatactactgcttactttcttgtcggagtgcctagcgtaagctgttttatcgcagcatacacaggctgagaccgttaattcgggatccgcggaacctgatcgggttaatacccgcgaagggaacaagagtaatcaaccgctgtcagcccacccaattttttacaggtctgtccagccatcaattatattactcttactcatttgcctgcgagctccagacaagcaactttcccaataacacagtttaggaatttgctatgtctcataatactgttatccctacaaccgatatttcaccaaaacccgatccggcacgcccacgtaaagctcaacgcgatgccgcccaagaatttattaattctattcaaggcgtgaccttcccaaattcacgacgaatttatcttcaaggttcccgtgacgatatccaagttccaatgcgtgaaattcaattatctcccacgttaattggtggcaccaaagaagaacctcagtatgaagaaaacgaagccattccggtttatgatacttccggcgcttatggcgatcctgatgccaagctggatgtacatgttgggttaactcaactacgtcaaccctggatcgacgaacgccaagatactgaacctgttgccgccctcagctccgattttactcagcaacgcctgacggatgccggtctcgatcatttacgtttcaatcatcgcccccatccattaaaagcccgtaaagacaaacgcgttactcaactgcactatgctcgtcaaggcatcatcacgccggaaatggaatttatcgcactacgggaaaatatgggacgtgaacgtatccgcggtgatgtgttacgccaacaacatcccggacaaagttttggcgctcagttgccggaaaatatcacaccagaatttgtccgtcaggaagtcgcggctggtcgggcaattatccctgccaatatcaatcatcctgaatcagaaccgatgattattggtcgcaattttctggtgaaggttaacgccaatatcggtaattcttcagtcacctcttcgattgaggaagaagtagaaaagttaatctggtccactcgttggggcgcagatacggtaatggatctctccactggccgttatatccacgaaacccgcgaatggatcttacgtaacagcccggttcctatcggtacagtccctatttatcaggcactggagaaagtcaatggcggggcggaaaatctcacttgggaaatattccgtgataccttgctggaacaagcagaacaaggggtcgattacttcaccattcatgccggcgtattactgcgctatgtaccgatgaccgccaaacgccttactgggatcgtttcccgcggcggttcaattatggcgaaatggtgtctgtctcatcatcaagaaaactttctctaccaacatttccgtgaaatttgtgaaatctgcgccgcttatgatgtttccctatcattgggagacggtctacgccccggttctattcaggatgctaacgatgaagcgcagtttgcagaactacatacattaggtgaactgaccaaaattgcctgggaatatgatgttcaagtgatgatcgaaggccccgggcatattcctatgcagatgatccgccgcaatatgacggaagaattagaacattgtcatgaagcgcctttctatactcttggccccctgacaacagatattgcacccggttatgaccacttcacttccggtattggtgcagccatgattggctggtttggctgcgccatgctctgttatgtgacgccgaaagagcatctcggcttgccaaacaaagatgatgttaagcaagggctgattacctacaaaattgctgctcacgccgccgatctcgccaaaggtcacccaggcgcacaaatccgcgataacgccatgtctaaagcacgttttgagttccgttgggaagatcaatttaatctcgcgctcgatcccgatactgctcgcgcctatcacgatgaaaccttgccacaagcctccggcaaaattgcgcatttctgttctatgtgcgggcctaaattctgctctatgaagatttctcaagaagtacgcgattatgccgctggtatggaacagatgtccgaagcattccgcgcccacggtagtgagttgtatcacagtgtagaggatgtatcccatgaacaatctgcctaacgcaccatttgccccaactgaacacagattggggctgtatccggtcgtggattcgctagcgtggatttcccgcctgttacagacaggcgtcaccacaattcagttgagaattaaagatctaccagaagatcaggtggaagaagagattcaacaagccattatgctcggtcgccaatacaacgctcgtctgtttattaacgattactggcgactggcaataaaacatggcgcttatggtgttcatctggggcaggaagatttagttatcgctgatctgaacgccatccaaaaaacgggattgcggttaggaatctctacccacgatgaacaagagctggcaagagcaaaatccctgcgtccatcttatatcgctctcggccacattttcccaaccacaaccaaagcgatgccatcttccccacaaggagtggaagcactgaaacgacaggtagaaaacacaccagactattccactgtcgccatcggcggaatttctcttgaacgcgtaccggatgtcattgcaacgggagttggcagtgtggcgctggttagtgccattaccaaagcaaaggattggcgtcaggcaactgcacaactgctttatctggttgaaggcattgagttgaaggggtagagaggttcttatgctgaatgatcaagaatttatgcgttacagccgacaactgttactcgaagatattggcccggaaggacaggaaaaactgaaatccagccacgtattgattgtcggactgggaggactaggcgctcctgcctctctctatctggccggagccggtgtgggaacaatttatctcgctgatgatgaccacttacacatctccaatttacaacggcaaatactttaccgcactgaggatatcccttctgcaaaagctgaacttgcagccaatcaactcaatgcattgaatccgctgatcaaaacaatggttcttaatcaacgtcagaacctggaatcgctgacaacaatcgtgaagcaagtcgatctggttctcgactgctgtgacaacatgacaacccgccacgctatcaatgctgcttgtgtggcaacgcgaaaaccgttgatcagcggcagtgctgtcggttttagcggccaacttatggtatttgaacccccttatcttcatggctgctataactgtctctaccctgaacagcaagagcctctacgaaattgccggactgcgggtgtattaggtccgatagtcggtatcatcggcacattacaggcattagaagccatcaaaatgttaactgggcttccctctccgttaagcggcaaactccgactgtttgatggtaaacaacaaagctggagcacactacaacttaaccggtcgcagcaatgcccgatttgcggagatatggcatgaaaattacggtaaacgaccagccgatggagcttatggcttctctggctatacagcaattgctagaacaacttgaacaaacacaaccgggaatggcactggctattaatcaaaccattattccgcgttcagagtggaatacgcatcgaattaatgatggagacaatatccttttgtttcaggctattgctggaggttgatatgttaaaaattgctgatacgacttttcattcccgtctatttaccggtacaggcaaattcgccaatgcaaatttaatgactcaagctatagccgcttccggcagccagcttgtcacgatggcaatgaaacgcattgatttgcagagcggtaatgacgctattttggcgccattgcaaaaacttggcgtcaaattgctgccaaatacttctggggccaaaaccgcagaagaggccctgtttgccgcccgtctggcccgtgaagcactggcaaccaactggatcaagctggagattcatcctgatgtgaaatacttgttacctgacccgattgaaacactcaaaggcgctgaaatgttggtcaaagatgggtttgtcgttctgccctattgcagtgctgatcctgttttgtgcaaacgtctggaagaagtgggttgcgcggcggttatgcctttaggcgcaccgatcggatctaatcaagggctactaacccgagatttcctgcaaattattattgaacaagcacaagtgccagtggtcattgatgccggcatcggtgcaccaagccatgcattggaagcgcttgaactaggcgcggatgctgtattagtcaacaccgcaattgctgtcgcacgtaatccagtaaaaatggctcaagccttcagaatagcgattgaagcgggtgaattatcttatcaagctggccgggcaagtccaaaacaacacgctgttgcatccagtccactgaccgatttcctgagagtgctctgatgacgaatcatcttacgaacagcaattttagttatcgctggcaacaattgagttgggatgacatcaccctgcgcattcatagcaaaaccgcgcaggatgttgaacaagcattaagcagtaacaaattaaatctggacgattttatggccttgctctcaccagcagcgaaaccctacatcgaaccgctggcacaacgggcacaaaaactgacgcgtcaacgcttcggtaacaccgtaggtttctatgtgccactttatctctccaatttgtgtgccaatgattgcacctattgcgggttctcaatgagtaaccgcatcaaacgcaagatactgaataaagatgaaattattgccgaatgtcaggcgattaaagcgctgggcttcaacaatctgttattagtcaccggagaacatcagggcaaggtcggtatggattatttccgccactatctgccgcttatccgcgagtatttcagctcaatcatgatggaagtccagcctatgacacaggaagagtactcagaattaaaaactctggggctagatggcgtgatggtttatcaggaaacctatcatcaaccaacttacctgttgcatcatctacgaggtaagaaacgggatttccactggcgattagaaacacccgatcgtcttggtcgggcaaaaatcgataaaatcggtttaggggcattgattggcctttctagtcattggcggacagactgctatatggtggcggagcatttattctttctgcaacgcacatactggcaaagccgttactctatttcattcccacgtttacgaccttgtaccggagggattgaaccggcatcgctaatgagtgaagcagaactggtacaactgatttgtgcttttcgtctatttgcgccagatgttgagctgtctatttccactcgtgaatctccattcttccgcgatcacatcataccactggcaatcaacaacgttagtgccggttcgaaaacccaacccggtggttacgcagatagtcgccacgaagaattggaacaatttatgccgcatgataaccgttctgtctatcaggtcgcagacgcattaattaaagccggattacagcctgtctggaaagattgggataactatttaggtcgataatttaattttctcttatctaaaataattctattttagataagagtatttaacaagaaataatcataagaaataagatttaatataaatatatccgatgaatttcaaacagtcatagatattacctcattattcactctattctttctctcaatgtgactaatatttcaacataacatttctgcaacaatgagcattgtcacgagcaacaaattagcctacagaaacacctatcaggataagcgcttataactcatttattcttgtattaatttatacaaattacaattcaccaccaacaaaaaatacaattgagtattatcccattattgataaagtgcccccccgaaaaacaaagtgctgaaagaaattaaattcatttctatctatttaaaaaggactaatatatgaacgtacaagaaatcctgaataatgaagattattctgatagcaagaaaaactctcataaagaactggttaacggctcattcgaagagggatataacggctggagaatcccagctcctgagtcagtagaaatcttatctgaaaatggcgttcactttatcagaatccaaagcgttaccggttctggcgtcattgatcaaattatcgaaggattagaacctaacactaaatataaactaacaggtacagctcgcgtatcatcagaatgggcctcatcagcttattttggtttacagagtcgcaccgaaggccccaacacttttgctgtaaacagcaccgattttacaaccggttcggtagaattaagtacagatcaagagggacttttacgcgtttatttattgaaagaccaagttggtcctcgaccagacggagaaaccgctgactttaccggttttattttagagcaagcttaagcatttaacttcgatatattttaacattttaaacatccagagttcacggctctgggtgttttaattggttgagaaaataaatttaaaaattataaattaatatcttaactggaatatagttcaattattttaagataaattcccatcgaaataatttagccctgtcatttattttcacattaattatcacaagcctaatcttcaatcaaaaaacatgattgaatattttttcattattgctaaagtatttataggaaaaaattattaagcaaaattaaatttaattgccattcatttaaaaggactcatatatggatatgaagaaaatgctaaatagcgcagattattctgatacaaaaaacgctaataaagagctggttaatggttcatttaacgaaggatatcgtggctggagaatcccaacccctgaaactgtagaaatcctgtccgagaatggcgttaattttcttagcatccaaacctattccagctctggtgtcattgatcaaataataacagggttggaacctaacgttaaatatcgactgacgggtacagcacgcttatcgactcaactaacaccacaaagggccttgcccgcttattttggcttacagaatcgcacatttggccctgaatcctttgttgtcaatagcttcaattttacgaccggttcagttgaattaaacacagatgaagaaggacttttacgtatttacatgctgaaagaccaatttgtagaacttccagaagaggcaactgctgactttaccggttttattctagaaagagtttaaacatcgggccttgatatatatacccaagaaacttcaagatgcagtttttagcacctgaaaatggtcgttaattctagacatcagcgagtccgctatatccggtagcgttgtggtgaaaaatttgaagacgttgtctcgaaattcatgtttatccgcaaaataacggttatttcgaacctgttcattcatgaccttccataatcgctctattgggtttaaatttgggctatagggaggaaggtaatgtaactcaatattgctaacataagcccactccttaacaagatgagctttgttgtaacccgccccatccacaataagatgaattttttgatgatagtcaggataagactttcttatttcattgaaaaaacagcaaatgttgtagtcattgatggtttgatattcctggaacaccgtacgaccaatggcattcaggttgagcgcgcccaatatattcaggcgagtccggcttcctgttgtttttactgtttttttctcgccttttcgcatccagccataaccgagtttggtgccttgagtcgggtgaacagcatcaagaaaaaggatgggttcgtctttcgctgtgactttaagattctcataatattcaataaattgtcgctgtttttctgcgtcgaatttatgagggacgccacaaggttttttataagaaaaaccctgacggtgtagccatttattcatgccgggaatgctaaaggtaatattccagagctgagcaacataggccacgatttcatgggtgtgatggaaaagatgttgagataagtgattgattaaaaaatcagtttgttcttgagaaagcaaactatcagaccccccattatcagatttaagtttaccttgattaaggtaatcgctgatatgacggttaacggtcatttcatgaagacgcagggcctgagcgatcatcactgaactccagccttcagaggccagcaggaccgctttgatgcgatcacactccctcttatcacggcaggtgtgatggagatgttcaagttcggctttttgttcatcggtaatgaatattttcatagcgaggataatgatctccatttcggataaaatcaagcatcttcaatgattacgggtatataccctatagatttcaagatggatcgcgacggcaagggagcgaatccccgggagcatagataacaatgtgaccggggtgagggagtgcagccaacaaagaggcaacttgaaagatgacgtatataacacccgaagtacattgctccgggtgtttaaagcctgtctggctaacttaaatcatgcaatggtttttttattggtggtgtcaattggaaatcagaaaaccgcacctgtaatccgtgccgctctggagaacaacacattgcaccaacaaagacaggttgtttatcttcaaaaaaaggagataacctcaacaatggccaccgaaaaccatcagtggaatattgcagtcttaaatatccctcttcacgagtcaaacgtaaccaaaatttactagcatcaccaggaaatacgcccatagaccaatcagaatgatgacgtgttagcacactaccaatcgaggcatgaccatcagaatattcaattccgcctttcagccaatgtttctcatcgactaatagcatgactcctgcctgatcgtataaatgttcaaaacagccttcaatacagagttgaaaggtgaaatcatcctcaacataacgcccaaaaacatgaccattatgacgttcaaagccataccatgttcgttgccaaaagtcagttttatgatctgtagtgacattaagccagccgcttccacattgccaatcagatggctcattaagccaatgatattgtgataaacccataggaactccctctattatcttccgcttgaattaatcaatttatatcctgcaagtaaggagatagagagtaaagcaatacaagcaaaagcgccgtgtaatgtcacaatatgcgctaatccgccgatgattgcaggccccagcaaaatccctgaatatcccatagtagaaaccgcggcaacagccagtgaatcaggcataattttctgttgaccggaagcggtaaaaagcattggtgcgatattagataatcctgccccgatcatcaggaaagagagccctagcattattgcggtcgatgctgagtaaataaggataaacccggaagtagccaataaagcactgctgataaaaacccgtcggtgtccataaagggcaataatcttatcaccgagaaagcggcccgatgtcatagcaatagcaaacaaggtataaccgatacccgcctgatgactactgatattatgtacgctggttaataatatcccactccagtccagcattgatccttccatgatataggcaacaaaacagagaaagcctaataaaatcacgatcccatgaggcatagcaaaaaatggcgtattatccgattcggcttcgtttaataatccactccataccggcagtaacaataaaataaccagcaacaccaccattaccatcgcctggagaggtgatattcccaaagataacaatgcactcaccgaaccggcaccagcgatcccgcccaaactaaataacgcgtgaaagccagacataattggccgccgagccattttctcaaccatgacagcgtggatattgaccacaacatccattgcaccaatacctgcgccaaaaataaataaaacgcaagccagtgttagcggtgtaggtaatacacttagccctggcaacatcactagcacgaccaaagcacataaagtgaagatttgccgacagccgaaacgtgcggctaacatgccggctatcggcatcatgatgaaagagccaataccgaacgccaacatcaggagccccatcgcgccattatcaagttgtagccgttctttagctaaaggaatcaggggtgcccaacttgcaagactaaagccggcaataaaaaaagcggcacgcgttgccatgatgggttgttttaccaaagagacaatattttgatcagacaactcatgttccttctatataatctatataaataaaatgccctccgatatgactaatcatggagggcattaagttacccaaaattaattttagaaaattgtggaatatcggtcagcgccccaataatacgagtagcctgttgatactgttccgcaaccgataaagcatgaggccaagcatacacgtagggaatacctgcctgcgttgctgctgtaattcccaaatcggtatcttcaatcactaatgtctgatgaacatccatagacttcaatttcaacatagcaagatagggatcgggatgaggtttcgtcctctcaacatcgtcacctgagattaaagccgggctttcgctcaattccaacaatccaatattcgccaaacagacttcccgcggcgcagtagagacaaagccaaaagggatacggtgctgttgtaaggccaatatcaacctggaaatccctggacgaaggtaacttttagccagcttacttttgtacaccgagacgatttgagcagtgatctctttctgttgctgagctggaaccccaatgtaatctaacgtttcctccaaactcaggccaataagttgctgtggttgtacatgctgtgtatagtcgggcgccaaatcacaaagaacatcaaagtgcagttgttcactgtcaacaatgaccccatcgatatcaaaaatcacattaaatctatccatgtgaaacattccattattttagatcggagatacggatcagcactttacagttcggagtaaaaagtggtttttggcttttgttagcaatatcgcaacccacagtgagaaaagcctgcaagtaatcattaaaatcaaaaacctggctaaccagacgaccggctggaataacaccatcacggatcatggtataagcacgttcaaaactgttattcagagaatcgatggaaccaatcactgaaaggctcttatcagcaattttcaagatatcaagattggcatgcttatctttaagcgccacattcaacaattttccgccaggtgccaaatgttcaaaaacgtattcggttaattgaccggtcgtatccacacagagatcgataagcgctgatttatcgccatatttctgtattaacgcctcatcaaaatcagtatacagctcacattctggtggcagattttctttggcaaattgaattcgactttcgtttttctcgaccatgaaagccttaacgcctctggcatgtaaagcccaaatgtagagcatccccattgggcctgcgccagctaccgctgcacgaatattagtatgagtaatgcccagtttatcaaccccggtcagcgtacaactgagtggctcagtcaatgatgcctcttccatactgacatgatcatccagctttatcagcgaactctctttagccagatattgctcagcaaatgccccatcataggaaacccctgcttcggttcccaattttttctcacaatgatttggactgcctgtctggcacatccgacaatgcccacaagaataggtcggattgatgacaacacggtcacccacattaaaacgcgtgacactcttccctatttgcgtaataacccccgttgtttcatggcccagcgtggttcccggaatagcaacaggataagatccggtgataatcccgacatccgtaccacaaacgccacacaccgcaatatcaacaacaacatcatcaggctcagcacagcgtaacggttcaacatcctggatttgcacatcccacacccgattaaatttaagtgctttcattacgctacctccttggtatccagcatatttaacgtcatatcagcaaaagtcagatcaagcttatacagaatttcgtttaaatgttcctgagtacaaattaatggtggacgaactttaagtgcacgacctttaccataacgagaaccccggatgatcaagtgatgagaattcgctattgcaatcgcttgtgccgcaaattcgggtgatggcgtatcaaagccaaacatataaccgacgcccctaacgccagtgatttctggatatttatgctgtagtgcgagtaagccatcacgcaaataagtttcattgcgttgcacattctccagaacttgttcctcttcaataatatcgataatttcgttaagcgccgttaatgaaagcgggttagcgcctgatgtactggaatgttcgaatgactctaatacatctaatgaactccgcatcagcacaccaccagtaggaatacctatgccaccagcacctttagcgaaaacaataatatcgggttctaattctttggcgtaaccggttgaagcaaaaaatgtcccggtacggccaaatccggtctgtacttcatctgcgataataataatgtcatgtttatgacagatgtctctgatcttacgataaaaatcaacagggaaaacgttatttccgccatttccttgaataggctcaatgataagacaggcaatattgtcatttgaccctaattgaataaattgttctaagtcaaaatattgattggattctgtattcggttcaagctctgacatgacactagtaggggttggaattttaaaagaaccatcaatgttgacatggaagtctttaattctaaaagcattacctgaaatttgcgctgtagctaaagactgaccatgatgagccagaaagaaagagataacccctgaacgtcctgttgctttttgcgcgatacgaattgcgcattcaaccgccccagagccggaaacatcacgtaaccatattctatcaatgcccttagggctatgtttaactaatttatccaaaatatattgtgacatttcatgggtataagctgaacttagatgtgtacatctgtcgatctgctgttttaatttttcagttattctgcgattagtgtacccaagtggaaggttaaatgtccccgaagctgcatcaatatacttttcaccatcaatttctaaataaggaccgtttccaacaaagcgagaaagcatatcttcaaaccgttttccattttccatcattttaattaccttgattaactatttataaccacaacaaataaaatcagattttaatatataagacaatatttactaaaaattagtttatatcaacaaaaagtctgcaagaacccaaaaaacatttaaaaaattaaagtattttgtataaaatatattattattttgaatgattggttaatagcatgcagaactgctgatttatagggttaatgataagaaattctgtacaaaccccataaaaactgtaccaaaatcctctataccctatggatttcaagatggatcgcgacggcaagggagtgaatccccgggagcatagataacgatgtgaccggggtgagcgagtgcagccaacaaagaggcaacttgaaagataacgggtatatcgagtgaaaaataagctgatgctacagcgcaagatcatttgcttatatttaagatatccacacaagctggctggtttacaccagtgaatagctcgtataaagttcaggctttaaaaaaagtaaagggttcagtctgtgtatgatccttgaacacccctatcgctagcttaaaatgactcgccagtaggatttctggtatatccaagctcgttggtgacgctaaagaacgaattccactgagcctatttaccaataaaaccaccaccattactgaaatattaaaagaacacacatgcaaaattatattcttctactacttagcttggcactttttggacctttgggtatcgatgtattcttgcctacggttcctgccattgccgaggattttaaagttaataatgaagtcattcagtcaacgatttctttgtttttattaattatggggctaggtcaattaatctctggaccactggtcgataaattcggccgtcggccagtagccctaacgggtatcaccttatatatcatcggttcggtgatcgcagcgctttctacttttcccgaaatgtttattgccgcgcgaattattcaaggatgtgctgtctgctgtaccagtgtcgtctgcattagtggtgtgcgtgatcgcctaaacggtgacgaagcggccaaagcctatggatttattaacggtacgctaaatattgttcctgctcttgctccgttacttggcggtattctggccgaaatgttcaactggcgagcgccattctggtttttgacttgctactcggttattgcactactgatcattgccaactggctaccagagacgcgccctgctaacactaagccaattcgcgggctaccactgaagcaatatttccaaattcttagcaatgcccagtttatgcattttgccttggttaatgccggcattatgggaatagtgattacctatgtctcatttgcaccaaccgtgctaatgactgagggccatatttcaccgctagcattttcattgatttttggtggcaacggactctggacgatgatcgccttcctaaccgccaataaaatcatccatcgacttggccgcccttgctgcctgctgttagggacaattctaatggcactggctagcctatctctgttctctggcatgcatctgccaactgtcgccagccagcactggctaagctatatgttgccggtttctttcgcctgtacaggtatggcatttgttatgggacctgcgaccagttatgcactagaaccttattctgacgaagccggtgtcgcttctgcactgataggattcgtccagatggctgtcggctccgctctctcgctcattgctatggcgttgccattttcgctcaaacagtcactcgtgttagttatgctactcggtaccacgctaatcctgtcagcacacatactcagtcgtaacctgaaagggcgggtagtttcgctagaaccctaaaatatctgtcatacacctaatcccatcatctgcatcaattgttgtgcttgctgaatcgcctcttggcgattcgcaatccctagcttctgatacagattccgtatatgtgtcttaatcgttgtcgtcgctacatccaactctgcggcaatctgatcattactgtagcctgagtaaatcaaccccaacacctgccattcacgctgtgtaagcggactattgcgaataagctcaggaacatcaggatgtgttagcaactgtgtgacaaaactttcatcaaaatgagcgaatttatggcgatgttgacgattgatatcccgcaaaatgcgctgcgcccgatgcaactccagttcagacaaggtattgagctgaataagctgacgtagctgttgggccatcaactcaccttcaatgacaaaatggctaataaatcctgtacggttagccagagacaacgcctcaatgagtgcactctgcgcttcgcttttgcgtccgatatgccagtaaagcaagttacacaacaataaattacgattcagatcgctgattaattgcaattctctcgcatgttgattcagtgtatccaaaatggactcagcttcatcatacaaaccaagcagaatctgagcacgagcaatattgcgccactggccctgattaaaatgattactgacgctttctggccgctcagtctgtgccaaccaccgaatagcggcgcttttgtcgtccatactctgccagatgatgactcgcagcttgtcagtattcgtacgccaatctctatgatactgcccattactcagcaggttttcacaacgcgccagataacggcgggcattatcaatatcccctctggtcaaagagcatttagccaactgggttaaacattgcaactgctgttgaggttggaagttagacaacacttccagcccacgacgtgccgcctcttcggcttcatcaagacgagaccagcaccacaaaagctgtgaacggatacgcaacaaaaattcatgcattggcaactgctccaaatgctgttcacggatcaattcaaatgccttattctgcgtttcataagccgtctgcaaatatccctgagctaataagatctcactttgctgcaacagcgcccacaacgcatagtgatgaacatgaaaacgacgcgcaagctgctcggtttgttgcatccgcgctaatgcatcagccaactcacctctacaatgtaatacttcaccttccacggaagttgcaacaatacgactgtattcattctgaggaagcagtgccgccaaagcttgtttcgccaacttatcagccatctccggcttaccactgttcatcgccacctgagcccgtagcgcatcgaattcagcgagcagatccggctctatagcaatttgtttctgttgcagtgcctgttccgcctggtttaacagggtattgacttctgaataacgatgttggctttgggccagccaagcctggagcagcaccagacgcggactctccaagagctgctcataaggcaacgcattcatacactcttccaacagagataactcactgtggttaaacagcgaccaagcatgttgcaacaaaatatcgcgcagcatagccgtatcccccgcagccaaggcatgatgaatcgcctcacccggatacccctgcgccaaccaaccttctgcggccgcccgatgcaactccggcaattgcaacgccatttcccattgacaacgttgacgtagaaatgaagcaaaaagcggatgaaagcgaaaccattcgccagagtcatccatacgctggataaacagcccctgacgttcagtctcttcaagacgctgctgaccattctcttcaccggttagacgaacaatcaagccgtcattcatggaacgtaagatagagctgcgtaacaaaaattcacgcgttgaactacccacctgattgagtacctcatccaccaaataatcggaaagatggccggcgttaatgcccgacaaacgtttagccgacagttcagcagcatcacacgactgccgtgctgacagcgcaataagctggagcgccgttgcccaacccgcgacttcattacataggcgcttacaatcgtcggcatcaagggatgtggttaaccgcttatcaaaaaattgctgcgtttcttgataatcaaacgccagttgctgactgtcaatttccagcagttgctcacgcacacgcagattagccaccccaagagaaggcaaattacgcgataagatggttaacgtcagattctcaggctggtgacgcaggaaaaaccgcatagcctcatgaatcatgttattcacaatcagatggtaatcatcaatcaccagaaaaatgggccgccgccactcactaagttcaataaataattgagcgaaaagcgcgggtaaattggcatattgatgtttttgagccaacacttcacttttaacacaatgtccctgcgtagcttgctgcaatgccgcgataagataactggcaaaacgttccggctgattatcgctctcatctaaagaataccatcccagattatcctgcccggcagcccactgagagaccaatgtggttttgccataacccgcggggctagttattagcacaagacgataattagacgactcattcagtctgattaacagacgctcacgcaagactgtattattcagacgaacgggacgactcagttttgatgggataagcattaatttccgtgcccaaagaagcgataagtaaaacctgcgccggaaccatatatacccgtcatctttcaagttgccctttgttggctgcactcgctcacccccggtcacatagtttgctatgctcccggggattcgctcccttgccgtcgcgatccatcttgaaatccattgggtatatttaaatgatttatttcatggtccgtaataacgccattaattggcccaaccaaatttagtgaaatagatggcttttgcaaatatgtttacgccccccatagcattaagttgcgcaccctatcacattcttgaacagcaaattccattttctacagataagttatggaagcgattagcaaattaccttaatcgatccactggaaaaaaatgaactcagtaaatacaaaagtgatacgcaatatagttactggctacgcccttctactcctccctgactaatacctctccaggatgatgctttagatcctgagagcattcagcatagtggttaaattttccttttcagctacaggatgaagactccatgcaacagtccagattagataaagcccagtttcaggctgcgctgacacgtcaatggcagcgctttggcctcggttcagcacaggaaatgactcagcatcagtggtggcaagccgttagtgcggccctgtcagaactggtgcccgcatgccctgtcatcaatcattccgagcaacaacgccatgtgaactacatctctatggagtttctgattggccgtttaaccgcaaacaacctgcttaaccttggttggtatgaagacgttcaggcttacctggcagaagaaaatatcattttaagtgatcttctggaacaagaaaccgaccccgctttaggtaacggtggactgggacggcttgccgcctgttttcttgactctatggcaaccgtcggtcagtcggccattggctatggtctgaattatcaatacggcctgttccgccaatcctttgaacaagggcaacaaattgaagaacccgataattggggacgagaatcctatccctggttccgtcacaacactcagttagatgttgaggtaaattttggtggcaaagtcgtcataaccgatgatggacacgaaacttggcagcctgaatttaccttgattggagaagcctgggatctaccggtcattggttatcgcaatggtgttactcaaccattacgcctgtggcaagcaacccatgcctctccatttgatctcgacaaattcaacgccgggcagttcctgacagcagaacagcaaggtgttgaagccgctaagctaacgaaagttctctatccgaatgataatcatcaagaaggcaaacgcctgcgtctgatgcaacaatatttccagtgtgcctgctccgtcgcagatatcctgcgtcgtcatcttctggcgggccgcaaaatagaagatctgcctaagtatgaagttatccaacttaacgatactcatccaacgattgccatccctgaaatgatgcgcattctgctggataaacaccagatgagttgggaaaccgcatgggagataaccagccatactttcgcctataccaaccacaccctgatgccagaaggtttagaatgttgggacgaagatctagtcagccacctgctaccacggcattacagcatcattaaagaaattaactaccggtttaaaaagttggtggacaaaacctggcccggcgagccagccgtatgggaaaaattagctgtacattataaccatcagatacgaatggcgaatctttgcgtcgtcgcgggctttgccgtcaacggggtagctgcgctgcactcacagctcatcgttaaggatctgtttcctgaataccatcaactgtggccgaataaatttctcaacgtgacaaatggcgtcaccccacgtcgctggatcaaacagtgtaacccggcactgtcaggattgcttgaccgtacacttaatcgcgaatggattaacgatcttgacgcccttaaaacacttgagccctatgcagatgacgccgctttccgcgaagagtaccgagctatcaaacaaagcaacaagatcttgctctccaattatgtcaataaagtgatggggctcaagctagatccaaacgccatttttgatgtgcaaattaaacgcttgcatgaatataaacgccagcatctgaacctgttgcatatcctatcgctctataaacaaattcaggaaaatccggcgctggacatcgttccacgtgtgttcctgtttggtgcaaaagccgcaccgggctactatttggcaaaaaacattatctctgccatcaatcaggcggcggagaaaattaacaacgatccaatcgtccgtgatcgcattaagatcgcttttatccccgattacaaagtttctgtcgcggagctcatgatcccggcggccgatgtttcagaacaaatctccacagccggtaaagaagcttccggtaccggcaacatgaaactggcactgaatggggcactaactatcggcaccttagacggagcaaatgttgaaattgccgaacaggtaggagatgaccacatcttcatcttcggacataccgtagaagaagtgaaagccttaaaagctgccggttatgacccactgaaactactcaaggaagatcaacatctggacaacatactcaaagcactggctagcggcgagttcagctatagcgataagcgagcattcgatatgctgctacatagtctgattgaaggcggcgatccttatctggtactagctgattttgcctcctattgtgatgcacataaacggatcgataccttgtaccgcgatactcaacattggacacgtagcgccattctgaacaccgctcggatgggtatgttcagctctgaccgaacaatccgtgattatcaacagcgcatctggcaagcaaaccgataaggaaagatcatgggggagaagagcctcgatcatttagcgaccgaggctggcattgtcgccagctacattaatgcttatggcaagccacaagcgattccaacggaaacccgacatcgcttgttagatgcgataaacgtaaacaaaccggccaatgcgccggtttcacccttgccgacagtaaaaatttttactcaaggtgaacacttcacgatcactctgaaagatgaagagcgctaccaatggcagatacggacagaacaaggagaggaatttcaggggcattgctgccataaactgatgctacctgatacgcttgctctgggataccaccgcctcactctgatacaaggaagccaatgctggtctatgcagattatcgtggcccccaaacgctgctatgaacccgatgctctactaaggagagaaaaactttggggtgcctgtgtgcaactctatactctgcgttcagaaaacaactggggaattggcgattttggcgacctgaaacacatgctgaaagagatagcaatacgcggtggggccttcatcgggctaaatccattgcatgcgctatatccgaccataccagaaagcgccagtccctatagcccctcttcacgcaactggcttaatgtgatttacattgatattaatcaggttgaagatttcaaacacaatgaagaagcacagagatggtggcaaacagcgacgactcaacgcatgttacaggatgcccgtaacgcggaatgggtagattacaccacagttatggcgttgaaaatggcagcactacgtctggcatatcaacaattcagcactcgtccagaacatgatccgtcaaaaaccgctttccaccaatttgtcatccaaggtggtgaatgtctctactatcaagctgtctatgacgctctgcattgccggttatatgctgaaaatagtacctattggggctggccggtatggccggaaaagtaccgcgatccgcacggtgaagcggtacaaacattttgccaatctcacccgcaggaagtggaatttttcctctggctacaatggctggccgatactcagcttgcagactgctttacccaaagccaaacaagtggcatgcccattggaatttaccgtgatttggccgtcggcgtagcggaaggaggctcggaaacctggtgcaaccgggttgtttactgcaccaaagcatcagtgggagcaccaccagatgcactgggcccactaggtcaaaactggggcttaccaccaatgaatcctcatgttttgcaatctcaagcttaccagccgttcattaagctgctgcgcacaaatatgacttactgcggtgcgctacgcattgaccacgttatgtcgatgcttaggctttggtggattccctatggcgaaacggccgacaaaggagcatatgtacactatccagttgatgatctaatggcgattctggcattagaaagtcaacgccatcgctgtctggtcattggtgaagatttgggtattgtaccggaagagattgtgggcaagctgcgcgatagcggtgtctattcttataaagtgctctactttgagcgtcacggcaatggggaataccgcgcacctgaggattacccgatacaagcaatggcgaccatcaccacccatgatttacctactttacgtggattctggcaaagcgccgatttgacacttggggaatcactcaagttatatcctgataaaaacctgcttcaagggttatataccgaacgtcaagctagcaaacaagggttattagaaggcttacatcgctacggctgtatcccggaacatatcggtgacacggcaaaagaggttggaatgtcaccgatgataaaccaagggttacatcgctatattgcccacagtgcctgctcactactgggactgcaacccgaagattggctggatatggataaacctgtcaatattccaggtacggtaatggaataccctaactggcggcgaaaactgaataccacattggaaaccctgtttggtgatgatcatgtcaatcaattgctgaaagatgtagataaatgccgtaaaaaagcaggaacagccagaggttaaataccgtaacgcctatttctcctgtacaggcattattctttccagtttaaaggatggttttaatctataccctatggatttcaagatgcatcgcgacggcaagggagcgaatccccgggagcatagagaacaatgtgaccggggtgaacgagcgcagccaacaaagaggcaacttgaaagataacggatatataaaccatccttcatattgctgatttttaacgccttgactatcaccgctgagttttcaccaatgataaatacaggtgttaagaaaagccgctttttgtctgtcagtatggttttaaaaactggaaaagaggccaagcgaacctcggaaaaaacaagtaaaaactttaatcatcaaaagtaaaaagcagtgattaataaggcttttttaaagtgggtaaaaaatccgataccatactgatattagaagagaaaacattagaaaaaacaggttttaaattgattaaataaggtaaaaaaaataacagcgttaacccgataacaagaatatatcctagcaaagcatttaacagtattaaccacattaacagctttaacagctttaacagctttaacagctttaacagctttaacagctttaacagctttaacagctttaacagctttaacagctttaacagctttaacagctttaacagctttaacagctttaacagctttaacagctttaacagctttaacagctttaacagctttaacagctttaacagtattaaaccaattctcttaaataaaagatttttcctgactgcaacaagtttacgaaaaatcagagactataattgtagaaaaccgagaagcatccccgaaaaagcaagagtatttaacaacattaaaaataattaaaaaaattggcattaactttaatactgttagctatctgccacccccactggttttaaatctaaaaaatcaaatatagaaaaaggagaaacgagaaaacctaaatatcattttaatgaaaacaaggacattaaatgcggttcagaaaatgtaaaagctattaaactcaccacaattaagcaataaaaaccgttcgttacaacaggtttccaattaaaaacaagcaccccatcagaatgaaaaccacagtacaagcttatcatatttttaacattacttttttaacttacatttctcttttaccggtgattaatcaactaaggattaaaaaataggtagtaaataacttttcaaaatagtagaacacttggagggaactcagtccaatttttgcaatctgatcaattgtagataatcccaaaccactaaacggactgagttatgcctatcatagcacctataccccgcaatgaacgacgccagatgaaaaaaattatccagaacacccgagataaagattatgctcgcaggctcatggccatattgatgctgcatcgaggcgagtctgtctctctggtcgccaaaaccctttgcgccagtcgttcttctgtctatcgctggataaactggttgactttatatggtctggaaggactcaaaagcctgcctgtgggcagacccgctgtctggaatttaatcccgctttatcctttactgtcttttttattgcaatattctccccagcaattgggctgcctgcgttctcgctggagtcttgagttttttataattaaaatcaatgaattattaaacataaaattatccatcagtaccttctatcgttacttacataaaatgggtatcgtgtggcgaagggcagccccgacgcttaaattacccgatcccgagtaccatgaaaaaatggcgaaaattaccgaggcattgtcaacgtgttcagaaaaacatcccgttttttatgaagatgaagtcgacatcgagctgaatccaaaaatcggggctgactggtatttaaaagggcaacagaaacgtatagtgacaccaggaaaaaaccaaaaacattattttgcaggttgcctgaatgttcaaacgggaaaagtgacttatgctgacgggttaaataagaattctcagttatttatcaatgtattggaagaacttgaacgccagtattgtcatgctgaaaccctcactttgattttggataattacagtatccataaaagccgacgggtcagagattggctggcttgtcatcctaaatttaatctgttgtttttacctgtttattcaccctggctgaataaaattgagcgtctgtggcaatccttacatgaaacggtgacacgaaatcatggctgtcagtatatgtggcaattgcttgagaaagtgaaaacgtttttaaattcatgtccctacaggaatagcagagaataaaaagagtgagtgtattataattatgaaaagttatttacactgataacaacttttcaaaaggcataaagtgactaaaaacaacctattctccgctatgtttaatccatttatcggtaaatcggtaatacatactatcctccacttattttacatttacctaaccagtcatgattatttaaaaagacaaacagggagagattaaacatttcactcaacagactgatttaacacaacgaatcaaagatttcagtagtgtgattaatgacatttagtcgaaattcactaaccattaaccgagggttgaaaagcaataatcacgtaaaataacattaatagaataaactgacattcaagtattttctcactatcattttgcgaagcaatcaataaaaatgcgattaaagaaaagataaaacgattaatttagctgaatttaagcactaaaaaggatttatcctaaaaaaacattaatggtatctccatactagaaaactatttattattgatttaataaagaaaaaaacaaagggggatgattcataaaaacccacagaattgccagtaaaaccaattggtaaaacaatgccagtaaaacagtgtcagtaaaaataaatcggatatgattaatgttcgtttaaacgtaaaaccacgatatacccgtcatctttcaagttgcctctttgttggctgcactcgttcaccccggtcacatagttatctatgctcccggggattctctcccttgccgtcgcgatgcatcttgaaatccatagggtatatatcataatgtttaaatttagcaaaaagcagatatccaaaagataaaaaacgattaaaaccagataccgattaaaatcatccgttaaaaaaacaacttttaatcacagtttaaaacctgctctggttttatgggtatttcaattaaaggctttagcatttgatagttatgaccgtacctttaatcgacaagcgccagtcgggcaaccacaattaacaagatgcccctccagcgcgacaggtattccttgtatattaaacaagttagaaccttccgcaacaacgccggtttgtttacaggcgggacaaaacaccggggcacctttacaggcaaccgataggtgttggtttaccaaatcggaaccctttaaaacctcacctccggttgttgtggtatcacctttaaggataacttttttactttccactacactgcgcattatttactccgttgtattttccgtttctcgtattaaatgccatacagttgtgcccggttctgcaccttcaacatcaaaagccatcgcaccctgagcaaagaaatactgcctgcccggcaggctgtcagtttgccagatcccgctgaccagtgccggatggtcacctctcaaaggggtcacttgtagcggtccccggtcataacgggcataccaagccagggtggaagttgaattaaaatgaccttcaccatagaagtgcaatgaatggccttcacaaggtatcacccgtatcggacgtatcagttggttaatggcaaaataactctccgggacactgcccggtagtggcgttaagtccgggtattgaccggcgcggatcatcagaccattggaataaggcgtaatcactacatcccggtagcggcgcagtacatgatgtatccagaattccccgcccagtcggtttacaaagcgtttggacagcagggtgatccagttaatgctccggatggaatgcccatactgtaatttagctgtgaacactgcggagttaacttgcaaggaagggtaacgttgcgccagttgatactctaaaggaaagtagtcatagaagtcattgggtaagaccagacagtagccacagtccccactatccggttcaagttgttcacacaaaaactccagccaggccataaaacgagccatgccctcttgttctttcagataattccaaggaagtgccaggcttaggtaagaactgccgttatcaccgcttatttcccgggaatccagataacgcatcagataatgaggtgcctcatcttcatttttggcatcactgaccacccaaccagaaaactggttttttttctgattaagaataccctcttccactttagcaatattttccggtgaatatttttttagcctttccagctcatgacggtgaaaacgcaagtgagagccaaactcttcccgaaaacgctggtagcaggccagaatgcgttgttttttcgcctgggtgtaaccctgtttaaaaaacaaggtgatagaaatccccagacgggaaacggtcagtccatcgccattacgaaaaagaaaagaggtcagttgtgatctcagttgggcaaagtaatctacagtttccatcattttctccgtgagtgatgagtcggtggataatttgttattcccacatacttgccgcttcccgtaccagatgccagagggttgtgcccgtctctgcaccttcaacatcaaaagccatcaccccctgagcaaagaaatactgcctgcccggcaggctgtcggtttgccagatcccactgaccagtgctggatggtcacctttcaaaggtgtcacttgtagcggtccccggtcataacgggcataccaagccagtgtggaaatatcatcaaaatgaccttcaccataaaagtgcagggaatggccttcacggggaatgactcgtattgggcgtatcagttggttaatagcaaaataactctccgggacactgcccgggagtggcgttaagtccgggtattgaccggcccggataatcaggccatcacggtaagaagtaatcaccacatcccggtaggggcgcagcacctgacgtatccagaattctccacccagtcggtttacaaatcgtttggacagcagggtgatccaattaatgccacggatggaatgcccatactgtaatttggctgtatgaaccgcagaattaacctgcaatgaagggtaacgttgcgctagctggtactctaagggaaagtagtcatggtaatctctgggcagcaccagacagtagccacagtccccactatccggttcgagttgttcacacagaaactctaaccaggccataaaccgggtcatgccctcttgttcttttagataatcccagggcagcaccagactcaggtaggagctactgttgtcaccatcagcttcatcggaatccagataatgcatcagatagcggggagcttcatagatatttttggcgtcactgatatcccaagtagaaagctggttttttttctgattaagaataccttcttccactttagcaatattttctggagaatatttttttagccctttcaatgaatgacgatgaaaacgcaggtaggtaccaaattcttcgcgaaagcgccggtagcaggccagaatgcgctgttttttctcctgggtatagccttgtttaaaaaacagggtgatagaaatcccaagacgagaaacagtcagcccatcgccattgaggaaggtaaacgcggccagttgtgatttcaactgggcaaagtaatctacagtttccatcattttctccgtgagtgatgaatcggtggataatctgttattcccacatacttgccgcttcccgtaccagatgccagatagttgtacccgtctctgcaccttcaacatcaaaagccatcgccccctgagcaaagaaatactgcctgcccggcaggctgtcggtttgccagatcccactgaccagtgctggatggtcacctttcaaaggtgtcacttgtagcggtccccggtcataacgggcataccaggccagggtagaagttgaattaaaatgaccttcaccatagaagtgcaatgaatggccttcacgaggtatcacccgtatcggacgtatcagttggttaatagcaaaataactctccgggacactacccggtagtggcgttaaatccgggtattcaccggcccggataatcaggccattggaataagaactaatcaccacatcccggtaggggcgcagcacatgacgtatccagtattccccacccagtcggtttacaaaacgtttggacagcagggtgatccagttaatgccccggatggagtgttcatactgtaatttagctgtatgaactgcggagttcacttgcaaggaagggtaacgttgtgccagttggtactctaaaggaaaatagtcatagtaatctttgggcaggaccagacagtaaccacagtcaccactgtccggttcaagctgttcacacagaaaatccagccaggccataaaccgggtcatgccctcttgttctttcagataatcccagggcagcaccagactcagataggagctactatcgtcaccatcatcctcatcagaatccagataacgcatcagataacgaggtgcctcatcttcatttttagcattactaacaacccaaccacaaagccgattttttttcctggcgagaatgccttcctctatcttaataatattttccggtgaatatttgcttaaccctttcagtgaatgactgtgaaaacgcaggtgagtaccaaactcttcgcgaaaatgccggtagcaagccagaatgcgttgctttttctctagggtgtaaccctgtttaaaaaacagagtaatcgagaggccaagacgggaaacggtcagctcatcagcattggtaaaaagaaaagaggtcagttgtgatctcaactgggcaaagtaatctaaagtttccatattttctctccgttaattatgaagcggtggcgaatgtcacactcgccaatattgctaggacggcggctaacgcggcggcgctaactgcggcagcggcagctaaaatttccaccagtgcaatcagtgcggcagcgacggcaagggtgacaaggataacaacggcaactccggcaacaatcaccaccatttccagcatgccttcccccacctcttttgatatctgcatccagctaatgtttttaagctcttccagggtgacgtctgaaccctgttgcaccgtctgccaccgggcttttatctcactctccgtccaagtcacgatttttcccgtttgttcattagcccaggaaaaagcgtagctgacctgatggcttatcgggtcaataatctcttcacacacccacttgccggtttgattgagccatgaaccaaattgggcaagaagctcccgagtactgtcgcggacataattcaacccattttcggccagacccgccacctcctgcccgaggacgacccagtcttcatagctgggtaaaaacgaccagcgggaagtgctgagaagcggtggattttttgtcaagggttgcggaatggtccccggcacaccctctgcgggcggtacgggtaaagcttcatcatcaggcggcgaaccgggcggcagcggggccagtgggatcggatttttatagtgttgggaaccgggctgataaagttttcgccacgcttcgtcatactgtttttgctcttctgtacggttatcgtcgacacgcatcaccccaaagcggtcttcggtcgcaatttggatgtaatctatttcttgatcttcggcaagtttatcgcccggaaatttcacctcaatcaacatctttagattatcagggtgcacagaatcatcgaagtaggtggcatttctgcccggccagcggagagcttcatctttaactagaataatatcgggacgccgaatacgtttaacaccaaattcctccgcgtcttcggcagaaggccgggcaaacggattactggattgcggtaagttatcgctataacgctgtttagaggccagactggtcgccagcatgggcagaggaacatccttcttcccccggatagcaaacaccacttctgctttatagggccacagaaagtcatgcttaagctcctcaaccttaatcaacccactcataatgacttgattaagaaagcgaatagcgcccagtttggtcataatcattgccggcaggcgcagggcatattcagctttttccgccagatagcaagggtcttcatcggcgggaaagacgccgatttccatcgtacagttaattgaggtcacggccggacacattttaccactattagatattgccatacttatttctccgtaaattccataacatgctctaccggtgtgttatcactggcctgatataaggtttgcttcggtttcggtgggttttctggtgaactcagttgcaaattttcttccgcctcactctgtacaatcaccgttctgcccaacgcatcggttttaccggaaagggtctgaccgccagcggtggtaatggtatagcgggtatgggccagtggtttaccgctctgttcactgagcagggtatagcgggcggagtagtcaaacagcgcaccggcggatttcttgccggtgatatggtcagtcatggtgatgctgaccccttcgatgcggatattgcccatcgggtcaataactatctgtccgcctgcgttcccaatgatgatttgcccgctttcagagtgcaccgtgatatgtttacccacggtaatttgctggttatcggcgatgtttaattgatggcttttaccaatggaaagggcttgctgacctttaatggtcaccgtttgattttgaccgacttcaagcgtctggccgccctgcacggcttcatcatcatcgtttttaattatcgcggtgcggttatgcgccacttctgtttgctggtcatggcctatctgcgtggttttgtcccggagaatctggctattcatatccctctgagcatgaataaacacttcctcgcttcctttattatcctcaaagcgcagttcattaaatccctctcctccgtgagtccgggttttaaaagtggtacgggttttctccgccggtaaattaagaggcgggcggttgaggccattataggtacaccccgtcacaatcgggcggtcgatatcgccgttgagatagctgacaatcacctcctgcccgacgcgcggtatcgccataaaaccgaaaccgttgccgttccagccttgtgccacccgtacccaacaagacgcgttgtcgtccgctttatcgtaacggttccagtggaaatggatccgtatcgcgccgtgttcgttcacataaatctcttcgcttcccaccccgaccaccgtggcgacttcatcaccgtccgccagcggtttgtagcggtaaggcggccgccagtcctggtttccgggaataaaggcgacctcgttggtcagtgttgtgccttcacccccgtcgtctgatgcgacaggttgccacccatgatgcgtgacagagattaactgccagcgggcgttcatggcttctatgggatgggattgcagggtaaaaatcttgcccggccgcagccggatgcagttggttttggcggtaccgactttactgtagtttcgtaactgttccagccgcagttgggtaaaaggttttccttcctcgtcccactggaaacgcccgtaactttcaaacaccgaatggtgcccgctatcgtcggattgcttctgatgctcaagcgaatatttggggttaagaaagttatggtctttctggaccgtgccattcgaacacaggtattcgccatagctccactggtacgccgtggtatcggtctcgtccgtttcaggatgcgtattgtaagtcagagcgatatccgcctgcatgcccaagtggcaatcacagaacaacgtctgttcttcctcaaaccagaagataatgccctcttccgccgccagccggcaccagaaatcataagcggattcgcgtttttgcgtggtgtattcccgttcggcatggcgtttatagagcgtatcgcgggtaaataaaatacgatgatctttaagcaagatcgttaagatttcgggtacagacttcagatggaaaatacggctatcctgattgagcgtcatcagccacattgtggggcggacagtgaaaatataaaaagtgctacgaccatcggtattaccctgttcagccccggttattaaaccattaatggtccgttcggtgacgccattgcgggtaatggtcagtgacgcgctgtcccccagttgttcattcaggggaatgtcatcacgtgagctcaccacctttaacgtcaggcgataaagctgtgacagctcttcctgtaaagtaaattgcgctacctgaaaggtggtttggggcagtgcgccaattcggcaggtgaaaactaatccatccatatttgaaaccctacataattgaaccattatcctgaaacggggataacgcaagaggctattaaacgagccatgacatgcggctcttttaaatagcgccggtctgttccgcggtaaaaaaatgacagcgtaaaatagccatcatttaatacgtggcgttagagagaacaatagaccgcgtccagctaggtaggatggagtggagacaaataacagagaatttcgctctctaaatattatgaccacaagatcatgatatttatcatatggacataaaaaaatgtgataaatatcacatgaaatggctcattaatcgctatcaatatatacccatcatctttcaagttgcctctttgttggctgcactcgctccccccagtcacatcgttctctatgctcccggggatttgctcccggggattcgctcccttgccgccgcgatgcatctttatatgtaaagtgaatttaaaatcaaccaggctgacacctcatcgacattcctctcctgccttatatcggctggagtgccttttcgaggtaaagatggtttgtagtgtgaaccctctttcaaccacgtttgtctgaccaataactactctactgcaaaaaatagcaaataaaataacccaatgggataggcagtaagttgctgaatgagataggatcttgacctgctaaacactaaattaaccttaccaatctattaccaataagaaggcattatgtggttttccagatttaaactggcttttatcgcacttttacttccctggttgctaacggtagcaacacaaatggcgggaagaatctatcttctcttaacttatggcagttatcagctcttcattgactctactcaagacgtggaacgaatgttctggatcggcggattgtttgatattcgtattgccagtctgctgtttgtgccttgtctgctgattgctagcttatttgccattaataaaaacagcttcaacatatggcaacacgcctatccgtggttggcaacaacactcaataccgtagtcggggctttgacggtaagtaatgtttactactatgccacttatgaacggtcgttcgatattttcatcttcggcttagtggaagatgatacgcaagccgtgctgcacaccctatggaacgactatccggtgattgaaagtttgctctgtttagcgctgttcgcaatgactgttttctggtcctgtctgctctggcaacgctaccttatttcacgcacagagcgcaaaaccagtctgccggtttctgcgatggcgacgctggttattttgactgtctgtttcattggcatgcgtggctccataggcacctttccactacgtcagtccaatacacaagtttcagaagtcaaaatgcttaatatgctgacacctaatggcccaatggcactgaattgggcgtttaatgatcattacaaaaacagccacttcccagaagcaacagatgcacaaggtagctggttattaaaccattttctagagaagccaacccccgcaaatctgtcaccgtttatggctaaaactgccgataatcccaccgctcaaaaaaatccgcctcatgtaatatttaacgtcatggagagtatgggttatcacctacaaagtttggatcgcccagatcttgatgtttttggcgctctacgccagcactggcaaaacgactggcgttttgaacgtttcatttctgaaggagatggcaccattgatagtttaagccgtttcttgatccgcagcccaaacagcgcagtcagtcaatccaccgcgcagcatctcgatttcaccagcaatatgttcaaaccctatctggcgaatggttacaaaattatcttcgtcacatccggtaacggcgcatggcgtaatttgaatcagttcctgccaaacctgggagtcagtgaatttatcgatcaaaatgggctgaaaaaacgctatccagaagccaaattcgatacctggggtgtacctgatgagtttatgttccgttatattgaagagcgcttaactcaggcagaaaagaacggggagcatgttctgattatgtcgttatctactactcatcacccaccgtataaatcgccggcaggttatcagaaaaccgacatcaagctgagtgataccgagaaacaacgtttaagtcatttggctagtggtagtgagttacaagaggtttttcataccctgcgttacgccaatgatcaattaggacaatttattagttgggtaaaatctcagtcattggcttcccataccattattgcggcaaccggtgaccataatattcgaggtatcagttatccagatgctcatgagttggcaatcggccacggtgtaccgttttatctctacgtgccgcccgcttatcgccaaaacgcaacttttgatgctaccagagtcggcagtcataaagacatttggccaaccctctaccatttgagcttgtcacatacagcttattaccgtaccggctgtaatttgctggctgaacatctagaccctatctggtgtcaaggatataacccggaagtcactattacacagcaaggagcttatgtcatgataggcaaaggtgaatttcgaccgtgggcaaatcaaacaggattattactcggtgacccccagccaatgacagcagaccaaaccaaacagttcaaacgttggcaggcatttaccgatctcctgtcatggcaattaaatcgtcaagttcaccaccagcaataattgatacttccgtgaatccctttaatctcaatatattaaagggattcacattgagaatattgcgattagccttttactcccccggcggtcaaaccactgaccaaccagcgctgagcaaccaagaagacgatggtaatcgggagtgccgagagcacagcagcggcggcaaaatctccccaaagatagttctgtgggttaaggtactgctgcatgcccaccgccaaagtgtaattgttcacatctcgcaaaagcagtgaggcaacaggcacttccgtaatcacaccaatgaaggaaagaatgaataccactgccagaatcggtaccgaaagcggtagcagcaccatacggaaagcttgccacggtgtcgcaccatcaagcgcggcagcctcttccaaggagccatcaatggtttcgaaataacctttaatcgtccagacatgcaacgcaatgccccccaagtaagcaaaaatcacaccaccgtgggtattaaggccaataaacggtacatattcccctagtcgatcaaacaaagcatacagcgccaccaaggaaagtaccgccgggaacatctgaaaaatgagcatgcctttcagtaaagtacttttaccgcgaaaatgcatacgggcaaaagcataagcacaagtcgttgataaggtaacgatacctacagcggtaataaaggccaccttaacagagttccagagccatagcataaccgggaaaggtggcggagtaacacggccatccggtgataccacactgtaacccagtgccaatttccaatgttcccaagagatattttccgggatcaaactccccgtagcaaagttccccggccgcagggagatagtaataaccatcagtagagggaataagatcatggcaataaaggtaaacatcaacaaatgtgtcgctaacaaacgccatttctgtgatttgggttgaaccattgccattgcattccttccttagtcaaatttaatacgggtagctttcaggttaataaccgccagtgcaccaaccaacaaaaagatcactgtcgcaatcgccgcagccaagccaaagtcctgcccactactgccgtcgaaagcaatacggtaggtgtaactcaccagtaaatcggtatagcctgccggcgtcgtggtgccaatgcgatctggtccaccaagggttaacaactgaatcagaacaaagttgttaaagttaaaggcaaagctggcaatcatcagcggcgtcaatggttttatcaacaacgggaaagtaatcttaaaaaagttctgaaacggccctgcaccatccattgccgatgcttcatacagatcatcgggtattgctttcaataaccccatgcagaggatcatcatgtagggatatccaagccaggcattcactacaatcagcatggttcgcgccatcgttggatcggtaaaccaagccggtttaagaccgaatagaccgttaagcaacagattgatctcaccaaaactttggttaaacaaccccttgaaaatcaaaatagaaataaacgatggtactgcatagggtaagatcaacaacacgcgataaacagcacgacctttcagcgcttcccactgcacgatgcaagccaaaaccatgccaacagcaactgtcagcaccacagtgaacagagaaaacacaactgtccaaacgaaaatagcgaggaatggtttctgaataccttcatcctgtatcacccgcaggaaatttttccagccgatggtaacagtaaatcctggcgtcaaagtctcattaccccatgttccctcagcattgacagactgatagaaaccggtatcggtattggggcgataaagcgtacctgtttgattgtcggtgagggactcaccatcttccccaagagagtattgagggtgcactccagagaattgacgtagcgaactcattttcagccggttaccatccggtaaaacaacaaccaactggttcaatgcctgtcgattctgggtaataatgcgcaatgtcgctgcttcaccgttctcaagattatcctgctcatacacatgcagagtcgtctcttccattgctgacagcgaaaacggttcggacactagttgcttcgtttggctcggtatactcagtgccaaaacccacaaatccgattttggatagagcttaaaagtcaatgcttgccctgactgatactgacggctcatcaggacagattgtgcgcgttcaaaagtcagttgattgatactactatagttggtgaaggcgatagcaatggtgcaaatgagtggaaacagtacaaacaatcccatgcctgccacacccggataggtatagcgccaggcataagtattgcggttggaaaaaacataaatccccatacctaacaataccagtgtcaccattgcaaacagatactctccctgtgagtacatcaataccaccagataaccggtaaagagtacacacaggctcactgcaagccatttcagagcagaatgctgccaccatgatgttttttcgagcgtcgctgacataatgctcttcctttttactacgacgtaacagctttgcggatagcttaatcaatcttcctgcaaacaggcatccttactggttgcaggaaagagaactccttcaaaaaagagttctcacaggttacttagttatacgggcttcggcatcacttagtgcggcatcaacggtctgacggccagccaacgcattaacaatagcgttgcgcatggcataccaaaaactgctcatttgtgagacgttcggcatgatttcgccgtttttagcattttccatcgtggctgcaatacgtgggtccttagccagaatatcgtgataggatttcaatgacacagcccccaacggcttatctttattcaccatctccagaccttcgttggtcagcaagtagttttccaagaactctttggctagctctttattcgggctggcagtattgatacctgccgtcaatacaccaacaaacggcttggacggatgaccgttaaaggtcggcaacaatgccacaccgtaatttaccttgctcttgtcgatgttggcccacgcccacggaccgttgatggtcatcgccgtttcacctttgttgaacgccgcctcagcaatggaatagtcagtatctatatttagatgcttatttctcaccaaatcgataatgaaacgcaggcctgatttggcacccgtattattcactccggcattcttcacatcatatgcgccattttccagcttgaaagcatatcctccgtccgcagcaatcaacggccaagagaaatatggctcttgcagattaaacataatggcacttttgcctttactcttcagcgccttatccagagccgggatctcttcccacgtttttggtggtgtcttcaccaagtctttattgtagataagagagagggcttcaaccgcgatagggtaaccaaccagtttaccgtcgtaacgcacagcatcccaggtaaacggaaatagcttatctttgaagctcggatctggcgtgatttctgtcaccagaccagactgtgcatagccgccaaagcgatcatgagcccagaaaataatatccggcccatcgccggttgctgcaacctgtgaatacttctctgcaagcttgtctggatgctcaaccgtaacattgacacccgtatctttctcaaacttctcaccaacttgtgccaggccattgtagcctttatcaccgttgatccagataactagcttaccttcctctatttttgcaaaagcagaggcagataacaccagcgtggctaaaacagaaagcgctaaagtacgggcgcctacttttaaggttgtttttatcatcattccgtccttatagtttaagtaggttcagagtgaactgttttgttacattggcggagagtgctgatctagtgtgcaattaacaatggaaatactcatcctcccctactctacgccctgcccggaatgggtgtgatctctattacaaaaacagaagaagcgtgccgttgcccacaaaaaggggcatctttttttgcgataaatatcacaatttatccagtagctcatacctaaccagctcaacaacgcttatctcatcctcctaactcctcccccataaaaaatttgggtatggaggatttactcacccgtcatcttaaacacactctgggttattatttttcaccgcgaattgcggtgataagtccgggggaacacatgtcgagcgtcacattacataatgtatcgaaggcttatggtgaaactattatttccaagaacatcaaccttgagatacaagaaggagaatttatcgtttttgtcggtccatcgggttgtggaaaatcgacaatattaaggatgattgcgggtctggaagatgtgacttccggtgatttgctgatcaataacatccgaatgaacgatgtgccccccgccaaacgcggcgttgggatggtttttcagtcttatgcactgtatccccacctgtctgttgcagacaatatgtcattcggcatgaagctggcgggcgctaaaaaaagtgatattcagcaacgggtaaaacaaattgccgagatgcttcaactcgctcacctgcttgatcgccgccctaaagccctatcaggtgggcaacgtcaacgcgttgctattggccgtactctggtagctgaacccagtgtttttctgttagacgaaccgctttccaatctggacgccgcactgcgggtccaaatgcgcattgaaatctcacgcctacacaaacgattgcaacgtacgatgatttatgtcacccacgatcaggttgaagcgatgacgctggccgacagaatcgtggtactggatggtggagatgttgcccagattggcaaacctcttgaactttaccattacccggttaatcgctttgttgccagctttattggttcacccaaaatgaatttcctgccagttaaagtcacggctaccgctattgatcaggtacagattactctgcccaaccgacagcaaatctggctgcccgtagaaagcaagggggtaaaagtaggcagtaatgtctctctggggatacgtcctgaacacctcctgccaagtgatatcgctgatgtcacgttggaaggcatagtgcaagttgtcgagcagttaggaaatgaaacccaggttcacattgaaatcccggccattcatcagaatctggtttatcgccagcctgatgttgtactggtggaagaaggatctaccttcaccatcggattacctccccaccgctgccatttattccgagaagacggaaccgcatgccagcgtctgcatgaagaacccggtgtttaagcctgagctaatcaaaaaacgacaggagaataattgatgaaatcaatgcgtatattacctatctcactaaccattatggccggattactgtctatcgaggcgtcagccgtagaattccacggttacgcccgttctggtattggttggaccggcagcggcggtgagcaacagtgtttccaaagcaccggcgcacagagcaaataccgtttaggtaatgaatgtgaaacctatgctgagcttaagctaggtcaagaactatggaaggacggtaataagagtttctacttcgataccaacgtggcgtattccgtggcgcaaaaaaatgattgggaatccaccgaccctgcgttccgtgaggtgaatgttcaagcgaagaacgtcatcgattggttaccgggttcaacattgtgggcaggtaaacgcttctaccagcgccatgacgtacatatgattgacttctactactgggatatctctggtccgggtgcaggcctgcaagatattgatctcggctttagtaagctcgcgctggccgtcacccgtaacactgaatctggtggttcttatggctggattgctagtcagcgcaaagaaattcccacctccaatgatgtctacgatatacgtctatccggtctggaagttaacccaggcggcaatctggagcttggttttgactatggacgcgccaacgcgcgagatcactacaaacttgaccgtcatgcttccaaagatggtttcatgtttaccgccgaacatacacagagcatgttaggaggcttcaacaaatttgtcgtacagtacgcgacagattccatgacctcctccaacagtggtcattctgaaggtgccagcgtaaacaatgacggttatatgttacgtattctgaatcatggcgcgattaatctcgcagaaaaatgggatctcatgtacgtagcgatgtatcaggatactgaccgtgacaacaacaatggcaacacatggtatacggttggtgtacgtccaatgtacaaatggacatcgacgatgagcaccctgctggacattggttatgataacgtcaaatcccaacgtactcatgacaccaatgatcagtacaaaatcaccctagcccaacaatggcaggcaggtgacagcatttggtcgcgcccggccattcgcctgttcgccacctatgcaaaatggaatgaaaaatggggtaatgcgaacaaaaaagacggttacatcgatggaatggcctaccgtgataccgcaacgcataaattcagccgtggcgacgatgatgaatttacctttggtgcacaattcgaagcttggtggtaatccggttacaacgatttgatctcagatcaatcaaatgatttgtaatggttaacgccttttataccctatggatttcaagatacatcgcggcggcaagggaacgaatccccgggatcatagcaaactatgtgaccggggtgagtgagtgcagccaacaaagaggcaacttgaaagataacgggtatagactgatatgcctcttgaccgtgggcatcagtctctttttttcaaccgaacaagggtaagagatgaaaactaaactgctctcatgttgccttagcgcggtactctgtagcacatttcctcttataggatatgcaacgcccattaccgcaactcaagcaactatcacagctaaaacaaccacaaaacaggatattgtcgccccgtccctctcgataacagcattgcaaaaactgagctggcaaccgattaataccagtgatactcaaaccattatcctcaatgcagcatctcagcatcttaatgagggagagattcaggggccgatagccgcattcgcgctgccggcaaaccggggctctttggatattaccctgagcagcttagtacaagataaacaagtttacgtgccaaatgttttagtcctggatcaagggttacgccccgccgcattttacccgagcagttattttccctatgaacgtccgggggttatgtccaccgatcggctggaaggcacactaaagctaacaccagcactggggcaacaacaaatttatgtactggtctacaccacccgtaccgatttgcagaaatccacccaaatggttgatccggccaaagcttacgcgcaaggcgtcggtaatgccgttcccgcgattcccgatcccgttgcccgccacacacaaaccggtacgttgaagctgaaagtgagatcggaacaaaacgccagcaacatcacgattggtcaagtcttctcaagtccagcacaagaaccgatcattgtcgggccaacacaagccatcgtaacgccgtctacgctgcaaaaagtcaaaccagtcctgagtgatacagaacgttatttcagtgatgcaattaaaaaagaaattagcaatggcaatatcgataaggcactcaaattgctggatgaagcggagcgccttggatcttcaacggcacgagaaacatttatcaacagtatcaaaaacaaagggtaaacaaatgctctccgaagaggagggcatcaggtttaactcctttttacacacatcccccggaaatggtttttttgtatacaaataattgttatgatgagtatctacacacaaaacaccctttaaagggattttacagtagagataacacaatggatatgctcacagcaattaacaaattagatgaattcagcaaaatgggaagagccgttttccttttacaggatttggaagtcatctttgctgacgagacttctcgaacattgcaaaaatctattgatcgcctcatcaaagccggactgttacttcgcattaccaaaggggtttatgtctatacgcgggccagcataggaagctatcccttggagactatcgccaaaaatatccgacgaggcgaatataattacatcagcctggagtcagctttatctcaatatgggttcatctcacaaatcccaatcgaccgcctgacaatcatgtctactggcagagctggagagtttaaaacaccgtggggagtcattgaaatcacccacaccagcagagagcctagcgaaattctgaaggcaacattagaaagccgtggccccctgcgtatcgcaaaaaaagagactgctctgcgtgaccaaaaaagagtggggaggaatatgcatttagttcaactagaggaactcaactatgtctagccacgttaactttaacgccattgttgatgaagtcattgaacaagacagactggcaaacctgaggccagttgtagaaaaagaactgttgcattatgacatcctgttttgtctttctaaggacggtttactcaaggagattacctttcagggtggtacatcgctaaggctctgctacggctctaaccgatttagcgaagatctggattttgctggtgggcgtggtttctgttccgctgatttgagtagaatcaaagagtgtatcgagaaatacctgggtgtacgatatgggcttgaggtcacggtaaaggaaccgaatgaactacgaaacaaaccggagtatgcagaagtaaaagtggataaatggcaaatatccgtcactactgcgcctgaacgtaaagacctgccaaaacagcgcataaaaatagaaatcgccaatattcctgcctatacaaacaccccccgttcattgataagaaattattcagtgttacccgacggatatgctgatctccttgtgtctgtcgaaaccctgcctgaaatcatggccgataagctgatagcattccctgctactacatctcaaattcgataccgcgatatgtgggatttattatggttaagtcagcaaaatacgacaccagacatagaactcattaaaagaaaagtatcagattatcagcttgataactttgaggaattgcttcaagccagaatcgactcgattgaaattattgttgcttctggtcactttcacaacgagatgagacgatttatacccgcacctatatacgacagaagtgtaggacaagaagcattttccacctatttaacgacgagcctaaaggagttgttaaccactgtgaagaaaagcctgtattcttcaggagacaactccattccattcaagttataacgattacatgtattttatggctgctctggtgccctagattaaaataccgcattgctgccactgagccgtttgcaatgaatgcgacttaagggttccttctatttcctttgtttgttgaatcaatatcagccagtattcatagagttgtttcaaaaccctgcatgcaatagcagttaatcattatttacatcctcaagtgcttcaggcagcagagcgttgcggaaaaacgatgccatattctgctgccaatcctccgatttgactagagatagatagcaacgcgtttttgaactaataactgtcgtacattagatctgagctaatacaggtaaagccttagtgattcttaacaggaaattatcttcataaagaaaggcaatagaattttttattgcttgatgatctcttattttatattcgtcaataatgagttgtaatttttcagacaactcaggaatactacctgatttataaagttcaccattaaaatcattgataatatcacccgggccacattgacaatctgaacttatacaatagataccataagatattgcttccgctaataccatgccaaagccttcatattttgaggttaaaataaaagcggacacctcttttatattatccatcacaaattcccaaggctgatttttccaaccgtgccaaataatattgttacttatattaagttgtgaagataattcttttaaataaacctcatcatcaccagaacctactatatgtaactcccaatgaccatgcaattgtgaaagcgctaaaaacagttcagttagattttttgacttataggcaagaattctgccaacatataagaatctggctatgtgttttggttgaggaatgataaaagagttcatcttgataggattgaaaataagatgaagcttgtctgtttttattccaaaggataacatttgatctcttaaaccagaactaattacaaggtgctcgtcggcacagcataaatctttaattttttgtgaggtaggatttctaatggaagtatgcagccaagagtaagtttttaccgggaaattaattttttcacaggaaagtcgagcaatattacaagatgttgtgtctaaacttattaaaatctcggggtgaaatctttctaatatcaaggacagttcacatgcaatatccgggcgagattcgtcattgcttggcgttaaggagatatattgagcatgagataaccaatcacgattttcaattctatttttcttattcagagatatgaaaatgaaatcaatttcaatgttggcacggccaatcaaatttattaaattcgaacataccgtttctaccccaccatatccattcaagaaaagatcatggtatattatgaatatttttttcattaaaaatcctttatcgaattaaccaaaaacgctcttgcacttttatttcattaatagttcgatgatatttctccaatgaaattaaaatgtttgatttattatcaaatagaggttctaattgagactcataaaataggatgttttgtgctttttcttttaaatcaatatccaccaatatggcacgcttatcaaatttattatttcttaataaagcactttccaaactatcagggttaataatagggtattcacctaaaacatagggaaaatcttcataaagcaatatcttaaacttacgtgaaccttttatattaggtacaagattatttattatgatatggtctacatgtcgacctatccccaaaggggcatagatataatcaggttgataatttaacaatattttgtcaattagctcttgagccatatcggatgcatcatctgatttatgtatctggccagtataaatcatggccgaatttttatacataggttcaccgtattgatcggtcctgtaaatgcaatctaaaattttaccatgtattggaatcactgataatttattgcaaaaagcaatatcctcattagctcgctttgaataaagttttataaatgaatatatattatcattatgtgcagagtgtgagtaatgagatgtcaggtctttatcatattcagtaaaaaatgttaaaataatcaccttttgattttctgaaactaatttatgtattaaaccgccagcgcttaaagctgcatcatctaaatgaggtgatagaaatagatgtatcattttaaatctccatgtaaaagttattatattttatttccatcagtacaatataaatagcagcgagatcaatgcgtatcccatccctattttttataaaatctgagttatcaatgtttgaattttcttggcattgaactctttcatcatgggcataaaattctttcattatatcaaaccagccagcatggattctttttgctgcaacttctattacgctgtcactgtggcctaatattgtcattaaatcagaaaaaatagtatcgtttgtagaaagtaagctctcataattaaaattatcagacacaatattatcatcgtatgaacaagtatcttttattacttccgatataatactcaggtcactctttattaaccttttctcaaatttcttctctttttcagtgaatgcttgataaggttttaaaaaattaacctgtaagttgtactcaatttcaagttttgttattgagtcttgcatagcagttttattatcgactaaatattttgcacaccataagtcgtgtatgcaagaagcaagaatatctaagttatcatcctgctccaagaacagacatatttcagaaaataatttaatttgtgaactatttaactggcaatttaaagttttttggctaggattaaatataaatgaagcttgttttaatcttctctgaatctctttggataaatatgttgaatttaaattgattttgctatccagcagttctttgttattttctttactcatgttccatctcctattctttgttcattaatcttatttctgttgatgatatatctaagcgaaatagattttctggaatagattcaaataaaaatcgatgttcctttctaatattcatcaagtcatcgacggtatgatatttattattaaaaaaacgtccagccaccagaaatcgacaatcattattcttaattgtcataagagatttttttaatccttcctcacctccataataaatagggttattaatttcttggcataaatcagcgccaatgacaaaaattgctccctggtaaatatgcgatttttcagtaaaaattttagcgtcacttaaaactatatcacctttccccttaaattgtcttatcctctcgaaaatttcatcggttgaaatggtaagttttaccgcattcttgattgacagttcataatagggttttcttttcgtcatcgctgtagcgatttcttttaattcttcatggcctttatgcagtggattaaaagaaccagataaaattaaagtctctttccagtctatgtttgtattgttaaaatctccgtttctatcaatatggatataattcaacttaccattaattaaatcaattagataacgctcattcttgtcaggcatattcatctatattctcatatgctattgttgttaattaaatatacccgttatctttcaagttgcctctttgttggctgcactctcttgccgccgtgatgcatcttgaagtttcttgggtatatatatcgctttattatataatcacatatttattaagtgccattattatattatttaccaatggtgattaatgatatattttcactcttttaaaataaatatcaatttgatttccctagtgattgccagaccatttgttaacggtaatttatacccgtcatctttcaagttgcctctttgttggctgcactctctcaccccggtcacatagtttgctatgctcccggggattcgctcccttgccgtcgcgatgcatctggaaatccatagggtatattgttttttaacattaaaaccattaactataaatattttattcgcagctcagcttattactaaatcgcctaacccccctaaattattctcattaattatcagtattttctctataattttcctcagtgatattaactaaggcagattttatttttaaaatatcttccgttgtatgcgtcgtatcaaggctaacccgaacagcgccatcaggataagtcccgaattttttatgcgctaacggtgcgcattgcaatccgggacgggtaataatattgtatttgttttctagtatataagagacttctccgggatgataaccttctactgtaaaaagaattgttggtaacccaacttgatgtttacagatcaatttgatcttctttaattgtgatagctcatctataagagttgtacgcaaagtttgtaattgattttgaatattctccactccaattttttttaaacgcctgatagacgctagcaatgaaagtatgccaatagtgttttgtgttcctgattcatacttgtatggtattcccgttggttgcgttgttaatcttgataatacacctgtcccaccctggattaattcattatgagaaaatccattatcaagaataaagtacccgccaatacctgatactccacctaaacttttgtgtccgctaaaaacaaggtaatcaatattacctttcgataaatccattacttgtgaaccaaaagattgtgaaccatcaactaaaaccatcgcgccgtataaatgtgccagttttcctatctcatctatattacaaaatgtaccaatagtattggcgcaactatgaatcactaataacttagttttcttattctttaataaaaacgccaaatgcgacatatcaatttcaccatctgtcacatcgataaattgactacttaccccaatgtcttttaaatggtttatcggcctaaggactgaattatgttctaaatgggtagtaatgacattatcacccggcttaagtgtaccttttagacattcgttgagtgaatatgttgctcctgagttaaaaattactgtcccatgtccatttaattttgtttgttcgataaattcgtgtcggcactcttcaacgagttccgtaacctttttagattgttgcgataaagatcgccctggagttaccccaagagtgtctaaatacatatttatcatgtctttcacttcttgtgactttggccatgaagtagaagctacatccgcatataacattatccaacctccatatggttactaatatatgatttgaattttttagccgtcgcatccatctcctttattccttcattatctctccaatcggatctttcaggcacatttaaactatttgccaatacggttcttatcattcctctctcaatgaaatctgattcacctatcgtaaaaatatacttattaccactatcttcaacgtaaatataggggccagcctcaccgaacatctcaagttcatccaatgagtctattgtatgcattttaaattgatcctttaatttattatgcagatcaatctcggtaggaaaacaacataaatgtgcatggtaacaatacttttgattcgggtccatgatgatacaaccaccggctcgtccattttcataacaaagaggattacttatattgtaatattcacgataaaaatcatttactatattcttaaactgtttcagttcttttattgcttcgtcatcatatatttctgcaaagcaccggcacccccctaaatcagtatcacatttattggtggcaattattatatagccctcaattatctgacctttaggtacgaacgcatagaaatattctccttgtaaaagtattttatctttttcaaaggaagattcggggtgacaaaaaatacatcccattttaaactcctcttatcgtttgtcgattctactgataaatatatcttcatgacacaaattgaagtcttcttcggtatgccaggcaatcatcatgctaaacttatttataatactatgtttattcagtctgctttgtagctcagaataaataggatttggtaagattattctgcattttgccctaatagcaaggcaagaatcaatcacagatataattgtaccgtgagctgtgtttgataaaccgattatttccaccgtggtatcatcaaaacctaatatcgctaattctttcccaaccgttaacagtttaatatcgctgtagcaaggacactgctttgcataagcaatccaattgttatttacttccctgccgaaaaaattgattttattaatattacctatttcattaaaatctctcaggtctacatcgattttagtacatccttctactactatttctataaaatcaaaaacgttcactctgccacatatatatttctcaaaaatttttgaataacattttatttttctttcatctgagtaacaaaccgtcgcatcgacatcattacgatgtgtttgtttggcactttctattatcaaagttggtgattttacactttcatctattccaaaatcgctaagcatattaatggatactcgtctgtttttaagactgaattcacactttcttgttataacaattgacaagcatatatcgtttattttataaaaaaatgcttttatctcactggaaagattatatttcttttctttaaaatttttccaaataaaataatccaagcttcctatgtcacgcttgtaaaaattattaattaggatataattctcttccgttatatcttcatagtttaggtttattccactctccattattttgccccattattttatattggcaacaattgctgctcatttttagtttatattcattcccgagtatatgaatcatgaaatattgtattttatgacctgtatcataatttaaagatccaacaggagaaaaaactgtgattatttatcctgaaaaattaaatttaagtcttcatcaatcatgcaagaatacggataaaaataggtactttaaagagaataatctttcataaattctatgtgatgggactttaaatgaaataattatattgaccagccccctgaattaaatatgatgagctatttctgcataccgaataatatcccttacatagctaaggtgacacaagcctcagagggcagaacgacgagctctgccacttttactgaaacaacgccataatatttaaaggtcattatcagactgttccattttagcaacagttggttgtttgatcccaagcacaactgccagctcagtttgtggaacatcacgggcctcgcggatctgataaagccttatctcccgtttcatttcatcaacttttttagcaattctacggcggctttcagggctgcgtttttcaagcaattcatcaagtgtgatcatactcagttttccaagatgggtagggaattaattcacacgattattttacctcttgcttttacaagaatttcattaataaagtcaaaagggttagtaatgcactaatcccattagcacagagaattacaacgtaatttgtgggttctggataccacaggcttgcgcatagcgcactaatgtttctatactagcttttgttacattattttccattttcgtcaccgttggcggcgtaacccccattctttccgcgacttgcgcgcgagtcagtccagcaaacttacgccactctgcaagtgtttcttgcaatctttctttacgttcttcagcttcgtaagcggctttaaattcagagtctttcatcatttctgccagaatctctgaatgtgtcttatatttcttcatgtttcatttcctccaatctgcgaaatgctaaagctatctcacttgggttgattttttgtgttttctttatataaacttgcagaatatatatttgctttcctgtctgatatacccataatccgcgtgctatatctccccccattgttcgaatttcgtaaagaccatttcccaaatgttttgtgtccggttcacgtagtgagcgaggatctttttctagctttccaatcaaccttacaagttttacccctacttttgctggcaaagacttaatttcttgttcggcctcatcatggtacttaactataaacactctaatttcctcctaatgcaaaaaattaacccaaaaggaaattttcatcaagaggaaaattgcattttaatgaaatgtcacttctgactaaatttcttgaccatagatttccatctatatagcatttgacctatattgaacaataagtaatcatgtgactatcgagacaacaggcacctttgatgcatggttcgatgctttgaatgacaccgacagggccaatatgctagcttcaataatagcacttcgggaaagaggccctatgttacccaggccatacgcagatactgtgaacggttcatgccacagcaacatgaaagaattacgtgtccaaagcaaaggcgacccgctccgagcattctttgcgttcgcccccaagcggagaggaattttgctttgcgctggtaacaaaaagttaaaatgccctctcaaaaggagggcatttattagctagcgtgttctaagaattacttcttatcaccaccaaaaccggcattcaacagttctgccaagttcgcagtagcctcatcgacactcacttgtggtgcctcggcaggctcattcaactggcgacgacgtatgcgatcctgatggtaagcataaccggtaccagcagggatcagacgaccaacgatgacgttttctttcaagccacgcagttcatcacgtttacccgcaaccgcagcctcagtcagtacgcgggtcgtttcctggaacgatgccgcagagatgaaggattcagtcgccagagacgctttggtgatacccaacaggtcacggccataagttgcagccactttaccttcttgttccagcttacggtttgccactttaacgcgggcatattcaacctgttcgccttccaagaactcggagctacctgcactttcaatggtcgctttacgcagcatctgacgaacgataacctcaatgtgtttatcgttaatcttaaccccttgcaggcggtaaacttcctgaacttcgttggtgatgtaacgggtaaccgcatgaacaccacgcaggcgcaagatgtcgtgtggagactctggaccatcagagatcacgtcaccacgttcaaccacttcaccctcgaacacgttgagctgacgccatttagggatcatctcttcgtaagcatcgccaccatctaatggggagataaccaaacggcgtttgcccttggtctctttaccaaaggagacaataccgctgacttcagccaggatagcaggctctttcggacgacgtgcttcgaacaagtcagcaacacgtggcaaaccaccggtaatatctttcgtaccgccggactcctgaggaatacgcgctaaagtatcacccgcagagatgcttacgccatcgtctaactgaacaatcgctttacccggcaggaaatattgagcaggcatatcagtacctggaatcaatacatcgtcacctttggcatcaacgattttcagtgccggacgcagatctttaccactaccggtacgttctgcactatcgagaacaaccaatgaagatagacctgtcaattcgtcagtctggcgggtaatggtctggccatctatcatgtcagcgaaacggatgataccagatacttcactgaccactggcatggtgtgcggatcccagttagcaacggtttcaccgccgttaacggtttcgccatcacctttacccagtactgcaccgtaaggcactttatagctttctttagtacggccaaattcgtcgatcagacacaattcagtgttacgagaagtaatcaccagcttgcctgcggagttcgtcacggacttagcgttaaatagcttcaagctacctttgttacgtacctgaatactggattctgctgctgcacgagatgccgcaccaccgatgtggaacgtacgcatcgtcaactgtgtacccggctcaccgatggactgagccgcaataacaccaaccgcctcacctttattgatgatgtgtccgcgagcaaggtcacgaccatagcagtttgcacaaacaccgaagtcagtttcgcaacttacaacagaacgtactttaatgctgtcaacggagctctcttctaacagatcacaccatttctcgttcagcaatgtattacgcggcaccagaatatcagcagtacctggtttcagaacatcttccgccgtcacacgacccaatacacgctcacgcagtggctctttaacatcaccaccttcaataaccggcgtcatcagaataccgtcgtgcgtaccacagtcatcttctgtcacaaccaagtcttgcgccacgtcaaccagacgacgagtcaggtaaccggagttcgctgttttcagtgcggtatccgccaaacctttacgagcaccgtgagttgagatgaagtactggagtacgttcaaaccttcacggaagttcgccgtaattggggtttcgatgatggagccgtctggcttagccatcaagccacgcatacccgccaactgacggatctgagcggcagaaccacgcgcaccggagtcagccatcataaagatgctgttgaaggaaacttgttgctcttcttcaccatcacgattagtgactgtttcagtcgacaagttttccatcattgccttagcaacacgctcgtttgccgcagcccagatatcgataaccttgttataacgttcaccggctgtaaccagaccagattggaactgttcctgaatttcagcaacttctgcttctgcttcggcaatgatcccggcctttttctctgggataaccatgtcatcgataccaacagatgcacctgaacgtgcagcgtaggcaaagccggtatacatgatctggtcagcgaaaataaccgttggcttcaagcccatcacacggtaacaggtgttcagcatcctagagatggcttttttacccagtggttggttaaccaacgagtaaggcagacctcttggtacaatcatccacagaatggcacgaccaatagtcgtatcaaccaaaccggtgttagttgtgatattgccttcgccatctttcacttcttcagtgatacgcactttaacgcgggcatgcagagaagccagtcctgcgcgatatacgcgttctgcttctttaggcccggtcaataccatgccttcgcctttcgcgttaacacagtcgcgggtcatgtaatacagacccagaacaacgtcctgagatggaacgatgattggctcaccactcgctggagacaggatgttgttggtagacatcatcaatgcacgcgcttctaactgggcttccagtgtcaacggtacgtgaacagccatttggtcaccgtcgaagtcggcgttatatgccgcacacaccagtgggtgcaactgaatcgctttaccttcaatcagaaccggttcgaatgcctgaatacccaaacggtgaagtgtcggcgcacggttcagcagaaccggatgttcacgaatgacttcatccaggatatcccataccaccgcctcttcacgctcaaccatctttttagcggctttaatcgtcgtcgctaaaccacgcagttctagcttgccgtagatgaatggcttaaacagctccagtgccatctttttaggcagaccacactgatgcaaacgcaggtaaggacctacagtgattacagaacgaccagaatagtcaacacgtttacccaacaagttctgacggaaacgaccttgtttacccttgatcatatcagccagggatttcagtggacgtttgttagaaccggtaattgcacgaccgcgacgaccgttatccagcaaagcatcgaccgcttcctgcaacatacgtttttcgttacgaacgatgatatccggcgcagccagatctaacaggcgcttcaaacggttgttacggttaataacacgacgatagagatcgttcagatccgaagtggcaaaacggccgccatccagtggaaccaatggacgtaagtccggtggcagaactggcagaaccgtcagaaccatccattctggtttgttaccagactgaataaaggcttccaacagtttaatacgtttggtcagctttttacgtttcgtttcagagttagtttcgtttaactcttcacgcagcgtttcacactcattttccagatcgagatttttcagcaaagactggatagcttccgcgcccatcttcgcatcgaattcatcaccaaactcttccagtgcatccaagtattgctcttccgtcagaatctgactgcgttccaagctggtcataccgccttcgacaaccacataggattcgaagtacagtacacgctcaatatcacgcagtggcatatccagcaacaaaccgatgcgagatggcaatgatttcaggaaccagatgtgtgcagttggagaagccagctcaatgtgacccatacgctcacgacgaactttagtttgggtaacttctacaccacacttctcacaaattacaccacggtgtttcaagcgcttgtatttaccacacaagcactcataatcctttactggcccgaaaatacgggcacagaaaagaccgtcacgctcaggtttgaacgtacggtagttaattgtttccggctttttcacttcaccaaatgaccacgaacggatcatatctggcgaggccagagcaattttgatcgcatcaaactcttcggtcttagtttgcgctttcagaaacttcaataagtctttcacgaaatggctcctgtcggagttagacctgtcaggagagcagcccatgccgctcccccctatgaccagtgcaaccactggctggtaaactgcccgtcatatccattcagggcagtaccagccggaatacgatttattcgccttccagctcgatgttgatacccagagagcggatctctttcaacaatacgttgaaggattccggcatacctggctccatctggtggttgccatccacgatgtttttatacatcttggtacggccgttaacatcgtcggacttgacggtgagcatttcctgcaaggtgtacgcggcaccatatgcttccaatgcccacacttccatctcaccgaagcgttgaccaccgaactgcgccttaccacccaacggttgctgagtaaccagactgtacgaacccgttgaacgagcgtgcattttgtcatccaccaagtggttcagcttcagcatatacatgtagccaacggtaacctgacgctcaaattgctcaccggtacgaccatcaaacagggtaatttgaccagaagttggcaagtcacccaatttcagcagctcttttatttctttctctttcgcaccatcaaacactggtgtcgcaattggcatgccttttttcaggttttctgccaaacgcataacttcttcatcagagaaagtgctcagatcaactttctgacgggtttcatcacccaggttataagctttctggataaattcacgcagtttggcaacttcctgctgctgtttcagcatcgcattgatcttgtcgccaatacctttcgcagccatgcccagatgcgtttccaagatctgaccaatgttcatacgtgatggtacgcccagtgggttcagtacgatatctaccggagtgccgttttcatcgtaaggcatatcttcgatcgggttgatcttggagataacacccttgttaccgtggcgacctgccatcttatcaccaggctgaatctgacgtttaaccgccagataaactttgacgattttcagcacacccggtgccagatcatcaccctgtgtgatcttacggcgtttagcatccagttttttctcgaactcagctttgagttcgtcatactgttcagccaactgttccaactgattctgtttctcttcatcagccagacccagttctaaccaacgctcacgaggcagtttatccagtttctcagcttcgatgccgcctgcaatcaaaacagaacggatacgtgcaaacaggccagcttcaaagatttgcaactcttctgtcaggtccttcttagcctgacgcagctgcatctcttcaatttccaaggcacgtttatctttttctacaccatcacgggtaaatacctgtacgtcgataaccgtaccggatacgccatttggtacgcgcagagaagagtctttaacatcagacgctttctcaccgaagatagcacgcagcagtttttcttctggcgtcagctgagtttcacctttaggtgtcactttaccaaccagaatgtcaccgccggttacttccgcaccgatgtaaacaataccggattcatccagcttggagagtgcagcctcacctacgttagggatgtcagccgtgatctcttcaggccctaatttggtatcacgagatacgcaagccagttcctggatatgaatggtcgtaaagcgatcttcctggacgacacgctcagaaactaagatggagtcctcgaagttataaccattccacggcatgaacgctacgcgcatgttctggcccagagccagttcacccaagtcagtagatggaccatcagccagtacgtcaccacgttccaccggttcgcccagagagacacatggcatctggttaatacaggtgttctggttagaacgggtatatttagtcaggttataaatatcaatacctgcttcacccggatacatttcgtcttcatttactttgataacgatacgagatgcatcaacgtattgaaccacaccaccgcgtttagcaacagaagttacacctgagtcaacggctactgcacgttccatacctgttccgaccaacggcttatcagcacgcagagtaggaacagcctgacgttgcatgtttgcacccatcaatgcgcggtttgcgtcatcgtgttccaagaatgggatcaaggaagcaccaacggaaaccacctgctgggtggaaacgtccatatattcaacctgctcacggttaaataagctggattcaccataattacggcaagttatcagatcttcaacgaagtggccttcgtcatctaatacggtgtttgcctgtgcgataacgaagttaccttcttcaatcgcagacagatagtgaatttcatcagtaacaacaccatcacgaaccagacgatatggggtttcaaggaaaccatactcgttagtctgcgcataaacagacaatgagttaatcagaccgatgttcggaccttccggggtttcgattggacatacgcgaccatagtgcgttggatgtacgtcacgcacttcgaagcccgcacgctcacgggtcaaaccacctggacccaacgcagagatacggcgtttgtgagtgatttcagaaagtgggttgttttggtccataaactgagacagctggctggaaccaaagaattctttcactgcggctgaaatcggcttagcgttgatcatatcctgaggcatcagtgtatccagatcacccagagacagacgctctttcactgcacgctcaacgcgtacaagaccaacacggaactggttttctgccatctcaccaacagaacggatacgacggttacctaagtggtcgatatcgtcgacttcacctttaccattacggatatcaatgagttttttcatgacatcaatgatgtcatctttactcagaataccagatccttcgacttcttcacggctcaatgagcggttgaatttcatacgaccaaccgcagaaagatcataacgatcttctgagaagaacagattttcaaacagattttctgccgcttcacgggttggtggctcaccaggacgcatcatgcgataaatctcaaccaaagcactcaaacggtcattggttggatcaacacgaagtgtctcggaaatatatgcgccgtgatctaaatcgttggtgaacaatgtttcgatagatttatgaccagattggctcaaacgtgccaacagatctaaagagagctccatgttagcagcacagataatttcacctgtgttgacatcaatgtagtctcttgcaacaactttacccgcaatgtattcaacaggaacctcaatacggttcacttcatctttttctaactggcggatatgacgtgcggtaatacgacggcctttttcaacataaaccttgccgtttgcttcaatatcaaaagaagcagtttcaccacgcaaacgttctggtaccagcgtcatttgcagtctgttgtcacgaatttcgaaaatcgttttactgaagaacaggttcaaaatctcttcagtgctgtaattcattgcacgcagaataatcgttgccggcaatttacgacggcggtcaatgcgcacaaacagattatcttttggatcgaattcgaaatctaaccaagaaccacggtaaggaataatacgtgcgttatacagtaccttaccggatgagtgagttttacccttatcgctgtcaaagaatacaccaggactacgatgcaactgggagacaataacccgctcagtaccattgataacaaaagtaccgttgtcagtcatgagcggaatttcacccatgtagacttcttgctctttgatatctttgaccgtgccttccggtgcttcacgttcatagataaccagacgcagcttaacgcgcagaggtgcagaataagttacaccacgaatctggcactctttaacatcaaacactggctcaccaagacggtagctaacgtattgcagctccgaactgccactgtagctctggattgggaatacagaacggaatgccgcttctaaaccattctggccttctggatcttgctcgataaacttctggaacgagtcaagttggatagaaaggagataaggtacgtccaacacttgcggacgcttaccaaaatccttacgaatacgttttttctcggtataggagtaaaccatagggttcctcagctcgctgatcagtgacccactctgcccgccctaaaggacagctctttacgacactgttttttcgaacagaaaattgaattattttccgtaatactcattgctattactcttaaatcatttcattgcgttacattactaccgagctacccgagtggatcgtagctgagaacgcagtatattaagtcgtcaataggaaaaagtatttgggggttaattaacagccaaacagtggaaatgctgctaatgccctacagcgcaaaaaggctggtgattttttaatcaccagccgtcagcctttcaagtcaggctgctaacttaaagctaaacttacttaatctcaacagaagcgcctgcttcttccagagattttttcagtgcttcagcgtcatctttgctgatgccttctttcagtgtagcgtttggagcgctctcaaccagatcttttgcttctttcagacccagaccagttgcaccacgtactgctttgataacagcaactttgttaccgccaatagcagacagaacaacgtcaaattcagtttgttcttcaacagcttcagcagcaccgccagcagcaacagctaccgccgccgccgcagaaacgccgaatttgtcttccattgcagtgatcagttcaacaacatccatgacggacattgttgcaactgcgtccagaatttgttctttattgatagacataacaagtgttcctaaaattcagaaataatttatacgttaaaaagcaacgaaggaaatcggcaattaagctacttctttctgctcgcgtaactcgcgtaacgcagccagagtacgaaccagtttgcctgcaacggcttctttcatggttgacatcaggcgtgcgattgcttcttcgtaagtcgggagtgttgccaaacggtcaatattggccgcaggaataaactcaccttcaaaggctgctgctttaatctcgaatgctggattcgctttcgcgaactctttgaacagacgagcagctgcgcccgggtgttcattagaaaaagcaatcaaggttggaccaacaaacgcttctttcaggcactcataggcagtaccttcaacagcacgacggatcagcgtgttacgaacaacacgaatgtaaacgccagcttcgcgacctgctttacgcagttcagtcattttatctacagtaacgccacgggaatccgcaacaaccgcagacagcgcgcctttggcaacttcgctgacttcagcaacaatcgcttgtttgtcttgaagatttagtgccattagcttcttgctcctggattaaccgggaagaacccggaactcacatcgctcataacaccataaaggggcctgagctctaaaacacggtgagcagaatccagaaatgaatttcatttggctctgtcaccgtctacgcaggaatattaagtaattacttacacctgcggtcttggacggggcttggattaggccaagctccaaccgaaaattttttatttagctaataaaaaaacttactagccaaacataaggcgccaaattttagacaaatctgacgccaaggtaaagcgataatcacaatcacattcagctaaaattaagctgaagcattcagaccagactggtcaatcgcaacacctgcgcccatggtagtagacaggctaactttcttaatataaatacccttagcagaagatggcttgccttttttcagcgcaaccagcagagcttccaggttttctttcaatttgtcagcgtcgaagtcaactttaccaatggtggtgtgaataatgccgtttttatcgttacggtaacgaacctgacccgctttagcattctgaacagcttcagcaacgttaggagttacagtacccactttagggtttggcatcaaaccacgaggacctaggatttgacctaattggccaacaacgcgcattgcatctggagaagcaataacaacgtcaaagtccatttcaccttttttaaccagttcagccagatcttccatacctaccagttcagcgcccgctgctttagcagcttctgcatttgcgccttgggtaaatacagctacgcgaacggaacggccagtaccatgaggcagtaccgttgcaccgcgcacattctggtcagatttacgagcatcgatgccgaggttaacagcaacgtcaacgctttctacgaatttagcggtagccagctctttcagcagaacaacggcttcgttaatgtcatactgcttagttgcatccactttttcgcggattgtgcgcatgcgcttggtcagtttagccatcgattaaccctccactaccaggcccatggaacgagcagtaccttcaattgaacgcatcattgcgtcaacgctagcaccggtcatatccgcagctttagtttcagcaatttcacgaatctgtgcgctggtcactttaccaactttgtctttgttcggtttgccggaacccgatttaatgcccgccgctttcttcagcagaacagccgctggtggggttttagtaacgaaagtgaaggaacgatcagaataaacagtgatcacaacaggaattggcagacctttttcaatgctatcagttttagcattgaacgccttacagaattccatgatgttaacaccctgctgacccagagcaggacctactggagggcttggattagccataccagctgcaacctgcaacttgacataggcttgtactttcttagccattgataattttcctctatgtgggtgatatcgcctttgatttaaaaggctcccctgtaattttagtcccgccttatccaggccagactactaaaaaacaaaaggcgcgaaattgtatgttaatttctcacctattgcaagccagcaaaagatacgctcaaaaattacgctttctctacctggctgaaatccagctcaaccggtgtcgcacgaccaaagatagaaactgaaactttcaggcggctcttctcgtaatcgacttcttccacaacaccattgaagtctgcgaatggaccatcgctgacacgaaccatttcgcctggttcgaacaatgtttttggccgcggtttatcaccaacctgctgaaggcgattcataatcgcatcaacttctttatcactgattggtgccggacggtcagatgtaccaccgataaaacccatgacgcgtggtacgctgcgaacgagatgccatgttgcatcgttcatgatcatttgtaccagcacatacccagggaagaatttacgttcacttttgcgacgctggccgctacgaatctcaacaacttcctctgttggcaccatcacttcgccaaaagaatcttccatatcatgtaatttgatatgttcacgtaaagattgtgcaacacgaccttcaaacccggaaaatgcctgtataacataccaacgtttttttggggaatctgacatcttagaacctcaggcctgtaataaatgaaactaaacgcaccaggataccgtcaagaccccagaggatcaaagacatcaatgcagtcacggccgcaacaatcaaagtcgtgtgcagcgcttcctggcgagttggccaaatgactttgcgcatttcaatgcgggcttcacgagcgaaagccagtgtggttttaccttttgcagtccagagcgcagccgctcccgcaagagcaacaataacaacaaccgtcatcgcgcgtagaggaaggctatgctctcgataaaggtagtttccaacgatagcaaccgttaataaggctgccactaatagccatttcattacttcaagactacgcctgctttcttgagcatcgctattcgtactcataaaccaacctgtaactatgatttaaatagatagccagcttgcctcgcaagagcaaaacaaatcagaccgaaccaaaaaatttgagtgattgtatctgacttggcgccataattcagtatgacattgtatatctgagagcgatatagccaattcgttgcatcagagcttatctcaccaataattaaaaacaactattgatgagataggttcttattaagacaacgtacaaaaagggcatcggttgatgcccttttagtgtaatcacatcaaaaaattatgcgataactttagcaacaacaccagcacctactgtacggccaccttcacggatagcaaaacgcagaccctggtccattgcgattggggcaatcagggtaactttcatctgaatgttatcacctggcatcaccatttccacgccttctggcagttcaatggtaccggtcacgtcagttgtacggaagtagaactgtggacggtagcctttgaagaatggcgtatgacggccaccttcgtctttgctcagaatataaacttctgattcgaaagtggtgtgtggcttgattgaacccggtttcgccagtacctgaccacgttcgatttcgtcacgcttggtaccacgcagcagaacaccgacgttctcacctgcacggccttcgtccagcagtttgcggaacatttctacgccagtacaagtggttttagtcgtgtctttgatacccacgatttcaacttcttcacccactttaacgataccgcgctctacacgaccggtaactacagtaccacggcctgaaatagagaatacgtcttcgattggcagcaggaatggctggtcaatagcacgctctggctctggaatgtagctatccagggcctctgccagttcgatgattttggcttcccactctgcatcaccttccagcgctttcagagcagaaccacggatgactggcgtgtcgtcgcctgggaaatcgtactgagacagcagctcacgcacttccatctcaaccagttccagcagctcttcgtcgtctaccatgtcacatttgttcaggaacacgatgatgtaaggaacgcctacctgacggcctaacaggatgtgctcacgcgtctgtggcattggaccgtcagtcgcggcaactaccaggattgcgccgtccatctgagccgcaccggtgatcatgtttttcacgtagtcggcgtggcctgggcagtcaacgtgcgcatagtgacggcttggcgtatcatattctacgtgagaagtagagatggtgataccacgcgctttttcttctggcgcgttatcaatctggtcgaatgcgcgagcgttaccaccgaaggttttagccagtacagtagtgatggcagcagtcagggtagttttaccatggtcaacgtggccgatagtaccaacgttaacgtgcggttttttacgttcaaatttttctttagacacgactctattccttaatatcgctccctcgttatattgggagggagctaaatctagatattaaacccgaaaagcttatttagctttacgagcttcgataatagcctgagcgacgttgctcggcgcttcattgtacttcaggaactccatggagtaagaagcacgaccttgggtctgagaacgcaggtcagtagcataaccaaacatttcagataatggtacctgagcacgtacgattttaccggtagtcatatcttccataccatcaatcataccacggcggcggtttaggtcaccgataacgtcacccatgtaatcttctggtgtttcaacttcaactttcatgataggctccagcagagctggtttcgccttcataaagccttctttgaagcccatagaacctgcgattttgaacgccatttcagaagagtccacttcgtggtaagaaccatcgaacagtgccactttaacgtcaacaatcgggtaaccggccagaacaccatttttcatttgttcctgaatacccttatctactgctgggatatattctttaggaacaacaccaccaacgatttcgttggcaaattcatagcctacgccacctggttccattggctcaatacgcagccatacgtgaccaaactgaccacgaccaccagactgacgaacaaatttaccttcttgttcaacagtagaacggatggtttcacggtaagcaacctgaggcttaccgacgttcgcttcaactttgaactcacgacgcatacggtcaaccagaacatccaagtgaagctcacccataccggcaataatagtctgaccagactcttcatcggtagacacgcggaatgatgggtcttcttgagccagacgacctaaagcgatacccattttttcctggtcagctttagtttttggctcgatagcaacagagatgactggctctgggaattccatacgctccaggataattggtgcgttgatatcacacagcgtatcaccggtagtcacatctttcaggccaatcgcagcagcgatgtcacctgcacgaacttctttaatttcttcacgtttattagcatgcatctgaacgatacggccaaaacgctcttttctgtctttcactgggttaagaacggtatcaccggagttaaccacaccagagtagacacggaagaaggtcaagttaccaacgaacgggtcagtagcgattttaaacgccagtgccgaaaatggttcgttgtcgtcagaatgacgctctgctgacgtatctttaccgtctggcagaatacctttaatggattcaacatccgttggtgctggcaggtactcaataactgcatccagcattgcctgaacacctttgttcttaaatgcagaaccacaggtaaccaggatgatttcgttagtcagaacacgatgacgcagaccagctttgatctcttcttcagtcagttcttcaccgccaaggtatttttccatcagttcttctgatgcttccgcagcggcttcaatcaaattgctacgccattcttccgccagatcctgcatatcagctgggatatcttcgtaagtgaaggtggttccctgatcttcatcgttccagttgatggctttcattttcaccaagtcaacaacaccggtgaacgcatcttctgcaccaatggctaattgcagaggtactgggtttgccgccaagcgagttttgagctgctcaacaacgcgtaagaaattcgctcccatacggtccattttgttaacgaacgcgatacgtggaactctatatttatttgcttgacgccatacggtttcggactgtggctgaacaccaccaaccgcacaataaaccattacggcaccatcaagaacacgcatggaacgttctacttcgatggtgaagtcaacgtgccctggggtgtcgatgatgttgatacgatgcgcatcaaactgcttagccatacctgaccagaaagcagttgttgctgcggaggtgatggtaataccacgctcctgctcctgttccatccagtccatagtagcagcgccatcatgaacttcaccgatcttatggtttacaccagtgtagaacagaatacgttcggtagtggtggttttaccggcgtcgatgtgtgcactgataccgatgttacggtagcgtgcaatgggtgttgtacgagccatttgattcctctattcctaggacgttcaatgtaaatctgggtggcagaacagccacccagggcatcatcactacgatgggattaccaacggtagtgtgcgaacgccttgttagcttctgccatacggtgaacgtcttcacgtttcttaacagcagtgcctttattttcggctgcatcagataattcgttcgccaggcgcagggccatagatttatcaccgcgtttacgagcagcttcaacgatccaacgcattgctaacgcattgcgacgaaccggacgaacttcaactggtacctgataagtagaaccaccaacacggcgggacttaacttccacggttggacgcacattatctaatgcaagttcaaatgcttccaggtgctctttaccagaacgctgagccagggtctcaagcgcactatatacaattgcttccgcagtagattttttaccatctaccatcaggatattgacgaatttggccagtaattcagatccaaactttggatctggcaaaattttacgctgaccaattacacgacgacgtggcatggaaatactccgtttcgaattcagggttgtccaaaactctacgagtttattttgacattaaggtaaataatgtttggccttacttaacggagtaccattaagcttttggcttcttcacaccgtacttagaacgaccttgtttacggtctttaacaccggaacagtccagtgcaccgcgaacagtgtggtaacgcacacctggcaagtctttaacacgaccgccacggatcagaattacggagtgttcttgcaagttgtggccttcaccaccgatgtaagaagaaacttcgtaaccgttagtcaaacgcacacgacatactttacgcagtgcagagtttggttttttaggggtggtggtatatacgcgagtacatacgccacgcttctgcgggcaagcttccagagcaggaacgttgctttttgcaaccttcatgctacggggtttgcgcaccagctggttaatagttgccattattaaaaaaactcctggtttttttgcttcgtaaacacggattaaatctcttgtctgccctaacggcaaaacacgaggacgcggaattttatggctgactcgccaaggtgtcaagaaatatacagctttttctcaactaccaagcgaattgttgatggtgttttaccgtcaggttaacaaagtcagtatagtcgatcacttgcactttgtctgaaacctgatcgtccaatccccgcgcctcaatatcttctttcagtgcatacaaggcagcaccacaactgatcaacgccgacagatagcaattaccctcaatacctgccagcacaccatcctgaataaacaagatgtcatcaccacgggcaagcagcttggatatcacattgaaatcacattgataaggcgatcggccaacagtatatagcatctcattgtccttccaatagctcagaatgtcagcacaacatcatagtcaaccagtttctcacggatcgtttctgcgggtatcactttcgcatccagaacaaaatgattgactgagcttaatccacgcataacaagatcttcctggcacaaataacattcttcaatatcgtacaaaggcaacaccttaaaagtagcgatatagtttctggcgagaattctgtcaggctgctgattgggtagtagttgaagtacaccgtcagaaataaaaaatacccctaccttttctgttaatgccgaagtggccagcaatgcatctaaaccttctcgaccccctgcatcaccatggggtgttttagtaaagataaaagcaatttttttcatttttgcctcttagaattgcaccacacggtcgcaaatcaacatagcttcagctagtgtgcccaatccacttaattcaaacccttccgcgaggtttgctaccggtaaattcaactcactcgcctgctgagcatcaataacaccacggcgaagggcagcggcaatacaaatgtgcatgctaaaccgatgctctgttgccatcatctgccatgcgctaaccaaatcaaactcatcactggctggtgaggtcaattgattgccgttataaaccccttcccgataaaaaaatacggtattaagtttatgccccatcgtaatcaaggcttgcgcgaattggtaagcactgctggcttgttgggtaccatatgcgggccccgtaaccagcagacaataagacagcgaagacattaccgctcaggccctaaacattcaccatttttaaactggcgaatatagaggtaaacagtatgcttagaaatatttaaacgctcagcaacctgattgattgcatctttaatatcaaaaatgcctttctcatagagatttagaaccacctgtctgttcttggcattattggatacactgcgatcaatattgacttcttcgatagtatattcaagcgtttgcgcaaccaaatcatccacagatgaggcaaaatttacatttggagcgacatcatgtgtttcctctggaataaatgtctgaataatttcagagaaagggacatcgagattcatattaatgcacaagaggccgatcactcggcggttccggttgcggatcgcaattgtgactgacttcatcaatgaaccgcttttcgctcgggtaaaataggctttggatgcactacagtcttcgtctgtaatgtcatgtaacatacgcaatgcaagatcagtgataggtgaacctatcttacgacctgtatgttctccgttggctattctgacagctgaacatttaagatcttccaatgaatgaaggacaatctcgcaatgcccaccaattagcatagccaagccatcaactgcggcttcataagactttaaaatttcgtgatccgtttcagtaaacggttggttttccagtaaatcgacatcactgatatcaccagataataacgggttagacattaaatacaccatccttcaatcgcagacaacgtcttgctaaaaacacaacgtgataaacctataaaaatttcttgtgaaaattcaattattgcagattaacagagatctcaatcaaagatctttgcatccacatgaaatattgacgttaaaaccacatgacattatcgtcaagccattgctactcagacatttgggctctatcacagctttcagtaacaaaaaaccgttgacagaatctctaccaacggttttatccgtattgatcaaagatatttagcgaacagctaaatagcttacttagctttggtctccgctttaacatccagcagctcaatatcaaatactagtgtcgaatttgcaggaatacccggcagatccgctttaccataggccagctctggtggaataaccagtttaatttttccgccttttttcacattctgtaaaccttctgtccaacctgggataacgctatccaggcgaatagaaaggggttcattacgcttataggaactatcgaactctttaccgtcaatcaatgtcccccggtagttcacaactaccgtgtcgcttgccacaggcttcttaccactgccttccttctctattttatacaaaaggccggttttactcttaacgacacccttttccttagcaaattcttcacgatatttaacgcctttagcttcattctcgctggcttctttttccatcttagcttcagcagcagacttcactttaccttcaaacgcacgcagcgtattttcaatttcgctgtcagtcagtttgctcttattattgaaagcatcctgcacacccgataacaattgatctttatccaatgggatacccagagatttctgttctttcagggtgttttgcatataacgccctaaagatgcgcccagagcataagcattttgctgatcttctgttttaaatgcgctgttcaattctgtactactctggctatctgctttagccgccaacacctgaggggcgctgaaagccatcgctaatgtggtagcaagcagggtaactttaaacaatgatttcatctgtttctccaatagctttgggggattttaccgtcagcaaaagttatgcaatcaagtcactataaccgtctacaggagcacaacacaatatttgccgttttttagtgccccaaacttattaggacaacataaatgactagaggtttcataacaaccgcatttcacagaatattctgggcatagtaggctactcttaattaatatgaggcatctaacacaggcaatacaggacctgaaacgggagaaaatcatggatctgtcaaaatttgagcaacggcttgagtgtttggaaagtcgaatggcctttcaagaaagaactatcgaagaattaaatcaggtagtgactgaacagcaaatggagatcactaaattaagagagcatttgcggttgatgacagaacgattgaaagccactcaaccctcaatgatcgcttcacaatctgaggaaacacctccgcctcattactagaaaagacattaaattacaataaattagggcaagcgctgaaactaactattccaaacttgccccgctttttttaaatattaaaagcccactatccgcttcagcttatcagtggcaaccaccgccaccgcagcatccgtgtccttcattatggtgatgatgactgtcgtcatcgccgtgaccaccacagcacccctcaccatgttcgtgaccatgagcaccatgaacatggccatgagccagctcttcttcggtcgcttcacgaatggcaatgacttcaacattgaatttcagattctgacccgccagcatatggttaccatcaaccacaacatgctcaccttcaactgctgtaatttctacgggtactggccccatatcggtatcagccaggaaacgcatgccaacttccagttcatcaacaccaacaaagacatcttttggcacacgctgaaccagattgtcatcatactgaccataggcatcatcagcctgtacgctgacatcaaaactctcacccgcctcacggccttctagcgccttttccaaaccgctgatcagtgaaccacggccatgcagatagtccaacggcgcactcgccggtgactcatcaactaaaacaccatcttccgttcttacttgataagccaggctgactaccaagtcttttgctactttcatgacatctcctacccgtgggtctaaaaatttttaccaattgtagcggaattttcagtctctgtactcactcgcgctaatattcacataattactgtggggtaaaaataccaataacctgctcctgctttctgacatgagagctcactttctcatcagtctggcgttgttggtgaccacaatggacacattccaccacatccacctgatcttcttgccacattgccagcgtgtcctgagagtgacattctggacagacagcaccggcaataaatctcttacggcttactgacatgatttgctccgctattattcatgtattcatactcattccaaccatccggttgacgacgttcactcagcatttctcgttcgaatagctcttccagttcccgtcgtgcctcttttatacgagatatgtgagccacatcaatacagcagcaggactttaggcggctgtaacatcgttccctcctcaagaacgtgtcagaacacgtattttccgttaccatgcatacgaacgttataaaataaaacgcttactatctgttattgctaatttaacatattctatacaaacgatacttatgattgttttctcttcattacaaattcgtcgcggaactcgtgttctgctggacaatgccagcgccactatcaatcccgggcagaaagttggtctggtagggaaaaatggctgtggtaaatctaccctacttgcactattaaaaaatgagcttcaggctgaaacaggcacattcacttttcccagtaactgggcactttcttgggtgaatcaggaaacgccagcactggaaatacccgctctggaatatgtcattgatggtgatcgtgaattccgtcaactggaacaacaactgcggatagccaatgaaaaaaatgaaggtaatctgattgctcatctgcatggtcaattagacacgattcaagcctggacgatccgttcaagagcatcaagtctactgcacggtttaggtttctctcaagagcaacttgatcaacctgtacgtgcattttccggcggatggcgcatgcgcctcaatctggctcaggcactactctgccgttctgatttactgttgcttgatgaaccgactaaccatcttgatctggatgcggttatctggttggaaaaatggctgaaaagctaccccggaacattaatccttatctcccatgatcgggattttcttgacccgattgccgataagatcctccatatagaacaacaatccctatttgagtacagtggcaactactcatctttcgaacgccagcgcgccaccaaactggcgcaacaacaggccctttataaaagtcagcaagagaaagttgcccatctgcaaagttatattgaccgtttccgtgccaaggccagcaaagccaaacaagctcagagccgtatcaagatgttagagcggatggaattaatcgctcctgcccatgttgataacccatttcatttcagtttccgtaaaccggaaagtctgccaaacccactcctgaaaatggaaaaagtcagcgcaggctatggcgaacggaccgttttaaattccatcaaactgaatctggttcccggctcccgcattggcctgcttggccgtaatggtgcgggtaaatccacgttaattaaactactggctggcgaactgcaatctcagagtggaacggtagaattagctaaagggattaaactgggatatttcgcccagcatcaactggaatatttacgtgctgatgaatcaccattacagcatttagtccgcattgcgcaacaggaaacagaacaacaacttagagattatctgggcggctttggtttcaaaggtgatcaagtgactgacccaagtgggcgtttttccgggggagaaaaagcacgtttggttttggcattgatggtctggcaacgccctaacctcctgttactcgatgaaccaacgaaccacctcgacctggatatgcgtcaggcactgacagaagctttgatcgactttgacggtgcattggttgtggtttctcacgaccgacatctattacgttcaacaaccgatgagttgtatctggttcatgatggccgggtagaatcattcaacggcgatttagaagattatcaacaatggctgatagatcaacaacgtcaacaaaatcagcaaatacgtgaaaacaacgataaggaaaaagagacatccagccaaagtgctcaggaaagaaaagatcaaaaacggcgtcaagctgacttccgtaaccaaacgcaacccttgcgtaagcaactggctaattttgaaaaacagatggagaaactgggtggcgaattggttgcactcgaaaatcaacttttagacagcgctatctatgatagcagccgtaaagtcgaattaactgaatatctgcaaaaacaaaatcagaccaaattaaaattggaagaaattgaattagcatggatggaaattcaagaacagcttgaaaaaataacacaagagtttgaaggataaatgattttacaaattatcattcaataaaaaataaagcggaaaaaacaatccgctttatttttcgataagtgaatctgtcattgagtcaaaaattcaagataatttcaattaatccttggatatcagttaaaattcacattgttatttaataacgtcatgtattaccccctaataaatcaaaaaatcagcattcaatgatattcataattatcattgaataatgaaaaatcctcattagctcaacattaatgaggatttcttatcatcagatgacattttttgtaataagagaaaaaatttctcatatcacaacatattttataaaaagagggtattaactgaatccttttgaaggaatttcccatatattggagaaccgttttacattgcttgctgtgtaaataacagtgtgggatatattgcggtgaccgagataatcctgaataagacgtgtatctcttcccaaatcagcaagagcatagccgcaggcatgtcttaacatatgtggatgaggtgaaatatcgactaatgcttgcctgccataacgttttaacaaactataaacctgatagcgtgaaatcgcacctgatttttgtgataaaaaaacccacgatgtgtctgattctctccagctcttacggatattaatccattgatttaacgcattaagttcttcaggcaccaatggatgtgttgttgatagtcctccttttaatcgccttacgtgaataatttccgagctaagatcaagatcggatagtgtcagattacatagctcactaactctaaatccatgaataaaacacatgagtagcatgcaataatcccgctcagcatgacgcccctgacgtgctttttctaaaatcgcatcaatttcatgtctggttaagaacttacgtttcttcatgaaaataattcctgtgagatttgggcagatagttaccgatagagaatattaatctaaataactatatcaattaatagagattttatggaattactgatctaaaattccatttatttatcataagaaagaaacaaatattttttatatgtaaatataaaattatatatatcattgaacagtgattttttgatagaaaatatcaggatgtagaatttttattaaaaattaagaaactattttacaacaaaaaactaaacagaatgcaccaaactgtgaatagttttacacaaaactatcacctaagtcaactattgtacctctccagactgacaacatttaaccatttgtaatatatggtttttttaatatctttttatgacttttaatattttatcaatattattttataaaaaattagttggtttgtttgagcttgatcagagatcaatcaattggaaagtttataaatttaaattaatgtcgatttttggatattaattccaaaatattatacattttagtatttataactaaacaaaacagtttggtgcattttgtttggttttaaaaaatgttgatatgagattttaagaccctttttgcattggatatctggtgtaggagttgaaatcctacactgctacttttgtatggttatgggtatcttatccttaagttaaggaattaactcacatgaaattgaataaattggttatggttctcggattgggtgcaaccctagcagcaggttctgtcaatgcggcccccgagccttcccccaaaactaaaagtactaaccaaggccacggaaaagtgacttttgaaggttctattatcgatgcgccttgttcaatccaccccggtgatgacgatcagactgtgaaactggggcagatttccaacaaagcactggcaggaggcggtaagtccaccccggttccttttaatatccgtttactagactgtgatgctaacggcttggaaaagaggactgtaacggcgactttctctgggacaccctctgctgtgaataaggacctactggcaattgttggttcggcctctggtgcggctattggtatcaccaacgataacgccaagctgatcaaactaggacaaccgagctcacccacaatcatcaccgatgattccgactctaccatgcgcttcgctgctttcttacaaggtgacggggcttctacgactatcgttcctggtgatttcaccgctgtggctaacttcactctgacttaccaataaaggtgttgaaagaagcctttctgtgcgttggaaagtctatctgtttctctttcccgcggttgcctagccttcaggctgacaggggaaacagcgggaaagaggggtccctacaagattagggaaatgaatttgccggtaaaccaaattttggagagcgagatgactcttcttagccgtccaacctgttctaagatgttaccttccctgctgacgttgttagtgctaaccagtctgatattgtcatttatggcaaccgctatcaaccaagagcacggccgcgtcaacatgcaaggctccatcattgatacaccctgtacaattgctttgggcaatcaagatcagaccatcgacatatcatctattttggtcggacaaattatccgcagtggtcacgggccggtacggcttttaagtatacagttgattaattgcctgttggctcccgtattactgaatcgcctgagcaggtcatactttcaagtgacttttgatggtgcggctgctcgtaacgacctatttagcataaatggcgaggcgagtggtgtgggattacagatatcggacagtacaggagcggtagtcgcgccgggcaaacccatgcctgtagaggatctgcaaataggctcaatgcggctggattatactttacgtctggtaacagctcaccaagtgttacgcgccgaggtcctccacaccatgatacgtttcaaactggattatttctgatgaaaggacccatcatgccatcgttactttgtggagcgagggatagctcggtggcactgtgtatcttgttggctctttgtcgcgtgcaggtggtcaaggctgccgatagggtggaattcaacacggatgttcttgatgtcaaggatcgggcgcgtattgacttaagtcagttttcccatgctggctacattatgcaaggtagctaccagatggtattacgcttgaataaaaacgaattgcccgagcagacagtgcagttcattgctcctgatcatgatccaaaaggcagtgaagcgtgcctgacgccgaagatggttgatcaactggggcttaaagcggatgcaatccgtcagcttacttggtggtataacggccaatgcctagaaatagcttctctgaaaggtatggaagttcgaggtgacttgggcgctggggcactatacatcagcatgccgcaggcttacttagaatataccgtagaaaactgggatccgccgtcacgttgggataatgggatctccggtatgttgtttgactacagcgtcaatgcacaggtgacaaatcagtcaggcgcaggcagccaagcgcaatctttaagtggtaacggaacagctggggccaacttgggaccttggcgtctgcgggctgattggcaagtgcagtacagccatactacgggacaggtaggaagtgcccagcaaagctgggagtggagccgctattacgcctaccgtgtgatagccgctctgcgtgccaagctgacgttggcggaagactacctcaactctgggatgtttgacagtttccgttacatcggagccagtctgatatcggacgacaacatgctgccaccgaacctgcgcggttatgcgccggaagtgacaggggtggcgaagactaacgccaaggtgaccatcagtcagcaagggcgtgtgatttatgaaactcaggtggcagcaggccctttcagtattcaggatctgaatactgcggtgaatggcaagctggatgtgaaggtacaggagcaggatggcagcgtacagacctttcaggtgaataccgctaatgtcccctatctgacacgtccgggtatggttcgttacaaaattgccgccggtaagccatcagatattaagcatcgcagtaaagggccgggctttgcaaccggagaattctcttggggggtgaacaacggttggtcgctgtacggaggcgctttgctggctaggggctataacgctctggctatcggtatcggccgtgacttgctggcgtttggtgcattgtcatttgatataacgcagtcgcgagctcagcttctgcatgatgacaccaaacatggaggttcgtatcgggttagctattctaaacgctttgacgaatacgacagccagataacatttgcaggttaccgtttctcagaacgtaacttcatgagcatgtcacagtatttagaggcgcgttattacggtgtcaataatggcagaggtaaagagttctataccatcacgtttaacaagcagtttaaggaattggggcttagtgtttatctgaactacggccatcagacctattgggaccgtccgaacaacgatacttataacctgtcactatcacgttatttcgacattggacgctttaaaaacatcagcctgagcctaacggcatatcggactcagtacaacggcactaatgatgacggtttgtatctgagtatggctgtaccgtggggtgaaaatagcacaataacctatgacggtcagcttagccgtaatagtagtaatactgtgggctactatgaccgtatcgatgacaacaatgcatatcggattaatgtcggtaacggtcagggtgggcgtagtattggcagtggttacttcacccatgagggggatatagctaagttgacagcgaatgccaatttccgtggaagtgaatatagcgctatggggctgtcacttcaggggggaatgacggcaacggcagatggcgctgcgctacaccgtatcaacatgatagggggaacacgcatgatgatcgacgctgatgggattggtggtgtaccaatacgcggttatggcagtgtgacccataccaacatttttggtaaagcggtggtgagtgatatcaacagttactaccgcagcagcgttaatgtggacgtgaaccaactggcggataacgtggatgcaactcgctcggtggtacaaggcacgctaacggaaggcgctattggttatcgcaagtttgggatgatcgccggcgagaaggcgatggccattattaaattgacagacggtacggctcctccattcggcgctatcgtgatgaacgaacgtgaaatgcaaactggcatcgtgaatgatgaaggaagtgtgtggttaaccggcattaatccaggcgagaacatgagtgtgcattgggatggtcgcatacagtgtctcatcacattaccgcaatctcttctagccaacttgatgaataatctgttgttaccttgtcggcgtgttaaagggaatgatggtagtgacgctgtagagacagttgttacaccagccaacacaggtaacgtagcgaggatcggcggcgaaaatggcaggtgagttaagacaaactggatgggtaattcaggtgtggagaaccgtaagccgcgtaagtatgtgctgcgagattagatttataccctatggatttcaagatgcatcgcgacggcaagggagcgaatccctgggagcatagataactatgtgaccggggtgagtgagtgcagccaacaaagaggcaacttgaaagatgacgggtatagccgtgatatcaaccatatttgcgcattcgcactcgattccagccaagggtggtggttctttccagaagattaataaaagtatggggtggatgaatggaaatgttgcctaaagataagtacaaccgcatgagtatgacaatgaaaaaaaacgcggcggcttctgctgtcatgttggccggtattctggctgttcagcaagctaatgcagctattgccctcgatcgcacccgcgcggtgtttaatggggaagatagatcaatgagccttagtatcagtaaccagaataaagagttgccctatcttgcgcaggcttggattgaggacgagcatggcaacaagattaacactccactgactgcactaccgccacttcaaagagtagagccgggagccaaaagccaagtgaagttgcaagtcactcagggcatcaacatgttgtctcaggataaagagacgctgttctatttcaacctccgggaaattccgccaaagtccaacaaacccaacacattgcagattgcgctgcaaacacgtatcaaactgttttatcggccaaaggctattactgttggccgcacggactacgaaaatccttatcaggagaagttgacgatgactcgacaaggggatcgctatgtagtgaacaatccgacgccatactacgtgaccatcgcatcagcatcgtccagcctaaatggaacagcggtatccggttttaatccgatgatgatcccaccaaaaggcagtgctgtgttgggtggcagtgcgtcagcaatgggtaacaatcctgtactgattttcatcaatgatttcggtggtcggccaaaattagtgtttggttgtagtggtggcacttgtaccgtgaaaagtagtaaacccggttgagatgtttgctgaaattggggtagctcagtaaaggaggcatgtatgaacaccatcctaaagccagatcgagatggactgataccgtccttgtgtcggcgtaaccgattacatgttcttaaagcgttgttgctcttgctttcgataagctcagtgtgtaatgcgaaggataaatttgaatccattgttcgtataaaagttaatgtgcttagagaagcttgtaatatccagcctggagatgatgcaattaccgtggacttcgatacagtgttcggaaaacacctttatcaaaatgaacgtagtcatagtaaagcgttttcaattcacctcataaactgtgatgtgacaagagctcgggaggtgaatataaaatttctaggtaaggaaaataatgagcttcctgggcttttggcttttcaaccgggaagtcaagcatcaggggcagcggttggaatagagtctctggctggagaacctatttcgataaacaagactgttaaaaaatatagtttaaataatggcaatgccacgctggactttaaagcctacgtgcaaggggaaccttctgctatcagaaatcactcaatagtatttggtaagttctcggctatttcgacgtttatgttggactatgagtgaaatggagggaatatgaggggctttttctatcttgtttttttcatggcattggcaggtgttccatttatagaggcaaatgcgggagcctttgttatgcctattggaatgagcgaagataatgacaggacgccgcgtacaactcaagaaataatcgcctgggatgaaaatgatacagacccaaatccatgtcacggttctggtgtttgttatgttggcccagatgtgaagtatagatatcgcctgccggggatgcatggtagttgtattgaggggaagcattgtattgaaatctctcgcttgaagactaagaaagaggtagctgaggcttacaaaaaaacatttccgttgccatatcgatcagatttccgtttgatatccactgatgcgacgtgtataggattgttttttattagacaccaacctactttaggattttcagatgcggagctgtggccgggtagtacttgtggtcggttgccaccaactaatcaatcttgcaatatttttttgccacctgttattgatcatggtgatttgggggtggaaaatctcaacgggaataagaaaacgataacaggaaatgtgcagtgcacattgccagctaacctgactttatatacaaaatcctcaacgggtgaaaagtttatttatttaaatcctaaaaaaacactttactccgatgtggatatcaatggctcaaatgcttggaatggtgttccaataacggtaagtggaaataatctctattcattttccttttcatccagacttcaatcattgggtaaagttgatgcaggtgcctattcgggagatgttattgtgattatgacttttaattagttttgatgctaatgatgctggggagtaataaggtgaataacttgtttgttcttaaacatatatgtgtgatgttgcaggtttggaaaataacaaggcgctgcattgtaccttatggttgttatttctacctactattagcagccgcatttcttttaacaggatgtgctcaagagctcacaccaaagagagtgccgacatcaagtaaaataaaagcatcgtcaaccactaagacattggttcattcttcattaccccctgaatctggaggcggtgattgtcgttttaccggaaatgtgcagccctctgctgacaacaattccggtaaattggcacaatgtactcgcgagttggaggcattgaagcagttcagcggcactaaatacacacgctacaaagccgaatttgatcgcattgcccgtacgggtagtcaatatttggcggtggctaacgggatcagtgaggatatcaatgatttagtacgtcctaagtatcagtatgctcttaccagtttgtgttatcgtataaaaaacgacttatcattggcattaattaatcaggtagatgcacaatgagctgtatacgaatgcatcttcatcgctgtgcctggttattaattggttttttgggaacggttgatattgtaagtgcagcagaaagtggaaactatacacctcctggcggtacgccctcggtggatagcttgatggaaagcgccagtaattctgattatggtctgagtaccctaatggcgcaacagtccaaatctggtgagtcatcttcaaacagaagtgcatcaaagcatgcggttggaacatccattcttgttggtatgggggcctcgtccggtggtagcgaagcagcagcccgtaaagtattgcgtgcagagaatcgtaagcttaagagacaactgaccgatagtatcgccgagttgaagtcttcccagactgaactagagaagagccgtaagcagctatctgaccaccaatcagtcaggatagaaatgcagaagcaaaaggatacattacaaaaacagttaagtgaccatcagaccctactgacagctacgcagcatcagttcaaagaagcacaaacgcagttagaggccgtgcgtaaacagttcagagaagctgacattgttcgagagcagttagagacggcattggtttctactcgttatcaactagtgcaagccaatgatcgagcggtaaaagccagtaaatccgtgagtgtaccgctcgatagcgataaccgtaagcgtgactatgtcgtgggccaagcgatggcctcggggctaaaagagacactggcgagttatgcagaaagtgggttatctctggatcctgttcgagtgactgccggattaactgatggattacgcaatcgcatgcagcttaaacgcagtgatatggataaatattacctgacctttgcggagcaattacaaaaacaggtaaatgccaaggttaagatgggagaagcactgattgcgaagaaaactgccggacgcaagccagcaaagaaagtcaatggcttggtgtactttgtggtcaagaaaggtcaccctattaaggatcaggatgcaccggtttcactagctttgtctgagcagattgttgatggtgccactttaagcgctattccgacactgacacttaccgctgacgatgatatacccgccgtagtgcgtgaggcgcttccattgttgggtgaagaggccgaagttgatgcctatgctttagctaaggtcgtgtatggcaacttaccgatgccgaaaggggtaaccccgtttacggtcttggtctatcacctgaaagggattaaaccccagtaaaaataaaccattttgacatccttatgccttggatttacccagggcatcatcaatctcatattcacctgatttaccctcataataatgatagatttatcaggcacaacaaaatcattattatttaaccagaggttagataattaataaaaacattcccctcttctacattacaatatacccgttatctttcaatctgcctcttttacacattatcaatcagtgaagagaataactccgtttcatttatcaattcataattgataattggactccataagataccaaaatcaatctccatatcggtttttaacacttctaataaatccaaatattgtgatggaattgagcgaataactttttccggaattaatgaaaaaccattacgtttaattattagttcaatcattaccataatatcattcgtttttaacattaaattcatactattatcataaatagaaaatgcgttaataccatcaataaaatcaattgggatatcattctcatccatgtcaataagctgatacaacgatgccatttcagcacttaattctgtaaaatgccgaaaccaatcactcccttttttaaaaaggtaaacgagtttttcagtaaaaatctttctaggcataagtgatgaagtcaatggtagaggaacaatggcgatatgtaataaaccagagtttaatagattcatttgctgctcaaatgtcagaccagtaattagcaccagcacagctttttccttcctacctagaaaaatccgctcttccatttttccagaatcataaataggaaaacaagagctaacataaaggtaatgtggcgcatcatcttgcaaatcatgattaacctgaatctgaaattgctcaaaatgacccagtaatttctgagcattctcaaaggttttttgtccaaaatcagtcaatctggtaccacctggtcctctggaaaacaaaagagccccaaattccgcttccagtgcattaactttcttagtcagtgcaggttgagaaatatgtagtatttgagaagccttatgataattaagtgtttcagctaacacgataaaagctttgagattgcgtatatccatatctccaccattcaggtttatctttcatactttcttacgttattatttcaataatgaactaaattatttagacttaactgaaattaattaaatagagattaaacaacaattataagatgatcaattaatttattataaaaatgttatcaatataaatatagattttattaataccataattccttcttaccctctaagataaatgggtaagtaattcacttaaattaaattcgttagaagataagaaatttcccgatttttagctgttttccctatagtaattcctatacacctaatgacatgtatttcctactatataggatagcgaaatatagcaggtaagcatcattctgaaaatataactattaattctcacttttaaataaaacctctcctccatccaccaataagactaatatcaatcacatagcttcatatcttttacataggtattcggcgacgtcaaagatatcttttggcatattaaataattctcacttctcagtttataattcacatacaaagatgtaggaaaacttaaaaaaagtgaaataatggctatcgaaccaaagtattttatgaaactatcatggtactttgggcaacggtttgttatattagaaagaataatagaaaccatacaataccaaatcaaaggagaaaaaaataacataataataacactacttgagaatgttattttctcatccatattaactaaagaaaccagattttctcctgtcaaaaagaaccctagtgatactaaaacaaaagtagcagcagcaacggtgatatgtataatcttttttttattttccataattcccccagttcttaaggaattaattgaagtcaaaaacaacaatatcaatcacatagtttaatatctttcacataagtattcggcgacgaccaggatattcttggacataccaaatagtcatcactttttaacttataatgcacatacaaagatgtagggaagcctaaaaaaaatgaaataatagctatcgtcccaaaacagttaacaaaaccatcatgatgttttggaggacgaccagttatactgacaaaaataactgcaaccatataatataaaatcaaaggagcagaaaaaaatattataacaacaccacctgagaatgttatttgttcatccatttcaattaaagaaattatattttcccctgtcaagaagaaagtagataaagctaaaagaaaaatagcaatggcaacgatgatatgtatagttttttttctcataatacccctagttataaaaaaatcaaatacaaccatatcaatcacatagcttcatatctttcacataagtattcggcgacgaccaggatattcttggacatactaaatagccatcactttttaacttataatgcacatagaaagatatggggaaacttaaaacaattgaaacaagagctatcaaacaaagatatttgttaaagctatcatgatgttttggataacgaccaaccacattaacaaaaacaataaaaactatataatataaaaccaaaggaaaagaaaaaaatgtcataaaaacactgcttgaaaatgttattttatcctccattaaaaccaacgaaatcaaatattcacttactataaacatagaaaacgacattaaagctaatattaaaattgcgcaaataatacgtattattttattatttaacatatctcccccaattataaaaaatttgattgagaccagtttctggagttcttggttttctctccatttcttttttaattaaattaataacagcttcactaattttatatttcttatctatagaatcaagtgcaacagtaacaccgacacctacaaaaaacacaataatagcaacaccaactacactggcaccagcaatagatgtaactaacatcaaagacccaatagtccaagaaacaaaggctgttattactgtcttagccagatctaccgcaatattacctagaaaatcagccagagtgtattcatccttaaacataagttcaaccgttcgataagccgcagaaaagaatatactaaacttcattcctttaactatgccgctatttaatcctttctgcccaatccccatagatatcaccttcatattagaagctttgtatcttgaagcagtgatgatctttctaactcccgcataacctgatattttaatatatctgtttccatccttacccacatactctgttgctttaatccctaatcttttaaattcccctataacattaaagagatcaaaagaatcatgaatgttacctgcatagggtgatatgggatcggtaatctcaaatattttctttataaatggacttttgggttttggcgagtcaatatcttctagcacatctttcgcttcatctaacgatagcagcgcaatataggttgtattctctcttaactgcttttcgagaccaatggcatcaaagaattcatgctgaggttttaattggttagccccaacatgacctctcaggaaatcccccatatagccctccagcgaggggttgtattttttatatgtcatcgtgaaaccctttccacatttcttaaaaccaataattatcacattagtgtctaaccgccggagtttccaatttgagagaaagaacacggccatctgaaatcttcatgtcgatcgcactggcttgagttgacaacaataactcaaaacactgcatcatcatcattgccaatttttcttctggaattaacgggctattcactaatacgtcagtgagctgttgtaataactgttgcctatctctatcgttcatacggctaaccccattagcaattaagaattcgaagatagcactatattacataaaaaatagtcatgtcgactatataatagcaaaatgttaaacaaacgcagaacgcctacagttaagttactgtatagtaatacaaaataatgcctgatgtttaaggataaaagtaataaatacattattgagcaaaaaattccaaactctattaaatactgtttctatcctttaagaaagaaattcaatattgaactgttaatttttttatattttggtgttaaggtcgtaccttcaccgcctagacatacagtcttaggtaatttaaataaagagtttgtctggtaattacttatgtcacatataatttatttatctttaaatggtaagaaacaaggtttaatttctgccggttgttcaacgctagactcaataggaaaccgataccaacaggggcacgaagatcaaatacaggtattgcatttgaatcacacgataactcgccaaaagaatgtcgatcatcacccggtacaatttatcaagccaatcgataaatcatcgccgctgttagcatccgcaatatcttcaaatgaactagtgaatgcgattttcttcttttacagaacaaatttcgctgggcagttagaacttttctatgaggtcaaattaacagaagcgagtgttgttgacatttcttgcgtctacccgcattcaataaatgataatgaaatgatgccgtacgaaaaagtctttctcaaatatagatccatatcctggaatcacataaccgccggcacatctgcctatagtatatgggatgatagaatttattaataagccagctttaactgattgaatcactattatgaatataaagattcttaatcctcaacacattttaaataattaacaccgtgataataatcacattttaagaataaatgattttttataccctatggatttcaagatgcatcgcggcggcaagggagtgaatccctgggagcatagataactatgtgaccggggtgagcgagtgcagccaacaaagaggcaacttgaaggataacgggtatatcatcaattccagaatattcccttaggaaaacaatatgaaaatcaatctcaacaatatggttaccgaaagtcgtaatccagccagtgccaacattgatactttgccaacccttgaaatgttaaaactaattaatgacgaagataaaaaagtcgcattggctgtagaacaaactttgccaaaaatcgctgaaacagtagacaaaattgccgaagcatttcgtcaaggaggtcgtttaatttatatcggtgccggtacatcgggccgattagggattttggatgccagtgagtgtcctcccacttatggtaccaaaccggaacaagtggttggattaattgccggcgggcatcaagccattctacatgcggttgagaatgcagaagataaccaacaactaggcgcaaatgatcttcaagcgctacactttaactcaaaagatgtattggttggcattgccgccagtggtcgtacaccttatgtcttgggtgccatgacgtatgcgaaatccgttggtgcgaccgttgcctgtattagctgcaacccggaaagcccgatgacacaagccgccgatattgctattgcaccgatagttgggccagaaattgtcacaggttcatcacgtatgaaagccggtacagcacaaaagctcattctgaatatgctgaccaccggtgccatgatccgtacaggtaaagtttatagcaacctgatggtggacgtagaagcgaccaatgccaagctggttgaaaggcagaaaaatatcgttatcgccgccaccgaatgtaatcgtgaacaagctgagcaggcactggctgaatgtgatggacattgtaaaaccgccattgtgatgattctggctggcatcaatgctcaacaagcaaagactttactgaaaaagcatcacggttttattcgaccgacgatctcagccgttcggtaatgacttcctctgctgagaaggagtaagaagatggcgaaaattaaccagtcagtcattgcccagatccttaaagctatcggcaatgcaaataatgtggcgcaatgtggcaactgtatgacccgtctgcgactaacactgcgtgacagtactcaggtggataaagtggcgttaaaacagatccccaatgtgttaggtattattgagagcgacgatcagtttcaaattgtgcttgggccaggaaaagcccaagcggcggctgagataatgaatgaattgctaaattcttctactcctacagcacaatcgaaaccaagcgacactcatttagccaatattgcttctgctaataaaaagcaacttaaagagaaacaagtcagtgcggtacacaaattcctgaccaaattcgctaccatttttaccccactgatccccggttttattgccgttggtctgcttctcggctttgctactttacttgaacagataactattcagggcgttgaacaccctaataccattttggttgaaatcatcggctatatgaaagttttcagtaaaggtatgttcagttttctgagtattctgatcggttataacgcgcaaaaagcatttggtggttcgggaataaacggtgccattattgcttctctgtttgtactcagttataacccggatgccaccagcggtttttattccggtatttctactttctttggttatagcatcgatccacgcggcaatattatcggcgttcttattgccgctattctgggagcatgggtagaacgacaagttcgtaagatcattccagacaatctggatatgatcctcacttcggctattactctgctaatcatgggagccattgcctttatctttatcatgccgctggggagttatctatttagcggcatgtcatggttattccttcaccttaacggcaatccttttggcacggcgatattggctgggctatttttactcgctgttatgtttggtgttcatcaagggtttgttcccgtctatttcgcactcatggaggctcaaggctttaattctctgttcccaattcttgcaatggcaggcggcgggcaggttggtgcagcgctggcactgtatgtcaaagcgaaaaaagactcgctgctgcgcacgcagataaaaggcgcgattattccaggcttgctcggcatcggtgagccgttgatttacggagtcacacttccacggattaaaccctttatcaccgcctgtttaggcggtgccgccggtggtttctttatcggtttaatagcttatttaggattacctgttgggttgaatacggtttttggtccatctggattagtagcactgccactgatgacctcaaacaatggcatttttgtcggaatggcagtgtatgctgccgggctagtggtggcttatatcagcggttttgtactgactctgatcttcgggagtaaaaaaatagaggtgcttaaagccgatgtccaaagccaaaaagaatgaataaatattctttataaccaaaatacaatttactgatgaattacccaagccagattaatggcacgcaggttgccgtcaatatacccatcgtaatattgaacagaaaccaagcattgcgactacggagtaacgtccctatcaatgaaccaaaacccgcccacaccatgccgcacaagaaattaataaacatcaccacgatgctgatcacgatgatggaatagaggtaatgatcaccggcaatactatagctgccaaccgcccccaaccccatcagccaggctttcggattcaaaaactgcaataaccaaccttgataccaccgcaccggcttgataacagcgctatctttggtatccagacgtcggtaactggctgttgctgttttccatgccagccacagcaaatagaggctacctgcaattttcatcaccgtgtgaatagcaggatagaccaacaacaatgcggctattccgaaagccgccagatataaaatcgtctgcatgcccagaacaacgccaaagagtaaccccaaagagcggataaagccgaagttagcgcctgatgaagtcaacaacatgttgtttggacccggcgtaatggaagaaataaataaaaaagttgttaatgaaaaaattaggcttgctgtcatgaagagttacctttcatcctgaacaatggcgtttccctttcacagaaaatatcagtatgttattcaccatacaagataactaacccgaattctgcttaatccgtcattgaaaaatcgtcttctgagtagaaaactttcagtgatggcttcttcaatttaaggcagtaagcaatcaatccacctaaaacgcacaacagaaagccttttatacttcggtggcgggaatgctctatttgagaaagagtttttaattgcccattaatcgtttcaatgataaaacgcttttttaacattatcttatcccactcagcttgcatactcgctttcatgttacgccgttttttcgtgatgaaagtgacatcggttttagctaaatcgtccgccaattcctggctgaggtaacctttgtcaccgtaaagagaacccgttaattcttttgataattcacgaacaggttcccgatcatccacattacccggagtcactttaagcgcgagaatttcaccctgatgattgacaaccaggtgtaatttgaaaccgtaaaaccagcccattgaattttttccgcgctttgctatccccgcaaagaccttatgtcgagggatgcgaatgttatggcagacactcaaacgggtggaatcaataaaagcaatgcctgtgggtttcccttttaattgagtcagatagctgcataatggcaccaaaacggaaggagccacactgacaaaacgaggatagctaagcaaggttggaaaatccttatggtgatatttccaaatatgttctagataaaaatgtttaaaatcacggtaatgcgacatatgaaaaaggatcaaaatggtcatgatttcactgggatacatatgaccttgtcggcggcgtaaacgatgcccgctatcgagacaaaattgttcccattgagggatgaaaaaacggcaaaaatcatcgacatcacagaaaatttcaactaagttgtccatagcctgttcccccctcggagctgtttttggtgcacaccaaaactttgctcctggaacaggcttctcgtcaatttcttatccagaattcgggttaactaatcaatttaactcgaaaccattatgaccgatatctttcgtcctctaaccggagccagtaatccgcatttgcagacactcctcccgcgtctggtgcggcggtatcctgaactgcaaccctattggcaacgacttgatttaccagataacgattttgttgatctggcgtggagtgaagatcccgccaccgcagcacacaagccacgattaatcctatttcatggtctggaaggcagttttcacagcccttatgcccacggtttgcttcatatctgtcagaagaaaggttggcttggtgttgtcatgcatttccgcggatgcagtggtgaaccaaaccgccaaaaacgtctctatcattctggcgaaacaagcgatgcccgttattttctaagctggttaaaacagacttacggtgatgtccccacctcagccgtaggttattcagtcggcggtaatatgctggcctgctatctagcagaagaaaaaatagatgctcagatcaatgctgccgttattgtttccgcgcctctgatgctggcagcctgctccctgcggatagagaaaggattttctcatgtctatgaacgctatttactcaatagcctgaaacgtaatgccacccgcaaattgttacgctaccccggttcactccccatcaatctgtctcaagtaaaaggattgaaacatattcgggaatttgatgaaattgtgaccgcgaaaatccacggctttaaaaatgcagcggactattaccaccagtgcagtgctctgccgcgtctgcctgatattactgtgccactgctgattattcatgctaaagacgatccttttatggcaccggaagtcatccctgatctcaaaatgttacccaaaaatattgaatatcaaatgacagaatatggtggacatgtcggctttgtcagtggctcattgaagaagccacaaatgtggctggaacaacgcatcccaaattggctgtcatcttatctggagcaaccataatgattatcccgtggcaacaactggaacccgaaactctgctaaatttgatagagagctttgtcttgcgggaaggcactgactatggcgaagatgaaaaatcgctggagcagaaagtcgctaatatacgccatcagttggaacggggggatgttatgctggtgtggtctgaactgcatgagagcgtcaatattgtgccaaaagaaatgttccattcttaacattatggagtttactgaatgtctgtcaaacatccgattattgcaattaccggctccagcggtgccggaaccaccaccaccagtttagctttccgtaagattttccagcaacttaacatcagtgcagcgcagatagaaggagatagtttccaccgctacacccgccctgaaatggatgccgcaatccgtaaagccaaagaacaaggcaggcatatcagttattttgggccagaagccaatgattttggcatgctggaaaaaaccatgattgattatggtgaaaccggtgaaggccgccgtcggaaatatcttcatacctatgacgatgccgtcccttacaaccagcttcccggtacatttacgccgtgggaatctttacccaagcagaccgatgtactgttttatgaaggtctacacggtggtgttgtcacaccacaacataatgttgccagtcatgttgatctgctcgtgggcgtcgtgccgattgtcaaccttgaatggatacagaaacttgtccgcgataccggagaacgaggacactcgcaggaagctgtgatggattccgtcgtgcgttctatggatgattatattaactacattacgccacaattctcgcgaacacatatcaacttccaacgtgtccctaccgttgatacatccaatccattctcagccaaaaccattccatcactggatgaaagttttattgtcatccgcttccgtgatctgactcaaattgatttcccatacttgttagcaatgttacaaggctcattcgtttcaagcattaataccatcgtggtccccggtggaaaaatggggctagcaatggaattaattatgacacccttggtgcagcgattactggaaggggaaaagatttgttaatcagcgcctgaggtcaatttagcaaatccggcacttaaaatttgcatcttatattattcagttaaaaaaacaggtaactgaaatattagttacctgatgttattttttgatcacgaaataatatcttaatctatatctttaacttcaaaactgtgggtaatttcaactgatttccccaacatcaatgcaacagagcaatatttttctgctgaaagcatgacggcacgttcaaccgctttatctattaaatctttacccgtaacaataaaatgcagattaatatgagtaaacaagcgtggcggctcttcacgacggcgggaagttaattttacttcacaatctctgatgtcatacctgcctttatgcaaaatagaaactacatcaatcgtactgcaaccaccggctgccattaataccatttccattgggctcggtgccttatcaccggcattaccatccatcatgatctgatgaccggaagatgactcccccaaaagagataatccttcaacccattttacccgtgcttgcataaatacctcttaagtcgttctttgcatccaagcctactctttcagtattaaactggcaatctagtgagcggtttattatgctgaaacaatacaagacaagacagaaaccctttcctgtgttaaaaacagaagtgggctaagtataggtaggttatgatcaatacttaaggttcaaatttcagataacctatataaaacccttatctgtcggtttttcaacaaactaatatgttaagctagtgtctttataagccagcctgacgagaaacttttagattctcgtgttatttaggcagcgataacaacagaggatgaaacgaatggttctcggcaagccacaaacagaccccactcttgaatggtttttgtcacactgccatattcataaatatccatctaaaagtacgcttattcatcaaggcgaaaaagcagagacgctttactacattgtaaaaggttctgttgcggttttgattaaagatgaagaaggcaaagagatgatcctttcctatctaaatcagggggatttcattggtgaacttggattatttgaagaggggcaagagcgtacagcttgggtacgggccaaaagcgcctgtgaagtggctgaaatctcctataaaaaattccgtcaactgattcaggtaaacccggatattttgatgcgtttatctgcccaaatggcaaaccgtttgcaaacaacttctgagaaagtcggtaatctggctttcctggatgttaccggccgaattgcccaaactttactgaatctggcgaaacaaccagatgcaatgacccacccagacggaatgcaaatcaaaatcacgcgtcaggaaattggccagattgttggctgttcccgcgaaacagttggtcgtattctgaaaatgctagaagatcaaaatttgatctccgcacacggtaaaactattgttgtttacggtacacgttaacgcccgattaatcagcgcataatcctgcgctgatttctcctgtatttaattacaccaactgattaattacctgctctaaccgctccattccttgagcaatctcttcttcactaataatcaacgaaggcgtgaaacgcagtacatcgcctcccgcactcaacaacattaagccattttcagccgccagttgcagaatatctttagcttttccctgatgtggcgctttaagttctgccccaatcagcagaccctttccacggatttcaccaaatatcgaatatttctgattgatatcattcagaaaattcaccattaaattatggcgtttttcaactcccgccagaaccgctggtgtattaataatatcaaaagcaacatttgcaactgcacaagccaacggattaccgccataagttgtaccatgagctcccggtgtcatcactgaagcaatattcactgtcgtcagcatggcgctgatagggaagccatttcccaatgcttttgccgtggtaatgatatctggcgtaacatcataatgcatataagaaaatagcttaccagtacgtcccatcccactttgcacttcatcaaacaccaacagcacctgatgcttatcacaaagctcacgcaccccatgaataaatgccggtgctgccgccgtgactcccccttcgccctgaaccggttctaatacaacagcacaagtatggtcatctatgacggccttcactgcatctaaatcattaaaaggcacatgaataatatccgcgggttttggtccaaaaccatcagcatatttgggctgaccgcccacggagacagtaaatagggtacgaccatgaaagccctgatgaaatgcgataattttggttttatagggattgtgacgcgcaatggcatagtggcgagccagtttaaatgccgcttcattcgcttccgctcctgagttggcaaaaaacacccgctcagcaaaagtcgcatcaatcagtttctgcgccagaatcaaagccggttcattggtgaaaatattactgatatgccaaagtttttccccttgctgcttcaaaacatccactaacgtaggatgacaatggcccaaagccacaacagcaatccctcccgcaaaatcaatatactctttcccatgctgatcccatacacgactaccctgccctctcaccggtataaactgcgctggtgaataaattggcaacataacttgatcgtatgtgtttctatctactgcgatatgctccttcatttccccacccgttttttatatatacgccattcagaagtgaaaacataatcaccgaatatgcataaaaaatcaaagatgggcaaatgaaaaagatggataaatgaagaaattatcggtatctggttaatatctcagaaagttgctcagtaactggtgaccttgctcactgagaatactttcaggatggaactgcactccttctagcggtagagtacgatgacgaatgcccataatttcatcgacattgccgttatgctggctccatgcagtgacttcaaatgaggccggtaatgtctctgcggcaatcaccaatgaatggtaacgagtcgcggtcaatggccggttaagccctttgaacacaccttgctgattatgatgaatagcagaagttttcccgtgcatcacttctctggcttttaccacgctggcaccaaacgcctgaccaattgcctgatgtccaagacaaacaccaagaatcggcaacttatccgaaaaatgagaaatcgcagacagagaaatgccggcttcatttggggtacaagggcctggggaaataaccaaatgggtaggcgtcaatctctcaatatcttcaagttgcaattcatcattgcgcttaactaaaacatctgtacccaattcacaaaaatattgatataagttatatgtaaaagaatcatagttatctattattagtaacataggagtctatcctactcatttttatcgctgtattttgttgccctgccactcctgcaatttgtttatcctgcacaactggctccaggtaaaacggcctcgcaacaacggggcggctatcatagcacatcaacatttgtagcatagtacaacaaaattaatggctgttttttcttcaatcaacttactctcataaccctacaaaaaaacatacgctctattttgatattcaataagtaaaggtaattgttatgaagacaaaactgattatagcatctctttttttactgtccttccccacgctggctgttaccaaagccgccaacattttctttccggaaaaaggggtggtttgtgataaaaaaggaaaatattgttctgatcaacaagggctatcgctaaaattaaccgaaagatatttaggtaagaaagcggtaaaacgcctgaaaaaagagattggtgatggaaaagatgtcgacttttcctcttacactttaagtaacggcgtacactgtgagagtaaagagaagaaatgctacaaagacagatattatccacgaaccgaagtaaataaagaatttacccaaaagatgtatgaataacggcgaaactggcctccatttaatgcaggccagtttgttaatctgatgagagttaaccggaagaccagaaactgccacagccaaagtcataggaaaaaattaagggataatctccgcagacagaatagcaacaggtttaaccggtacattctgatatggaccaacgttttccgttttgacttgagaaattttatccacaacatccataccttttacgactttaccaaatactgcatagccaaaatcacgctgaccgtgatcaaggaaagcattatccgctacattaataaaaaattggctagtggcactgtctttatcagcggtacgtgccatagagatagttccgcgtaaattacgcagtccattatctgcctcatttttaatagcagctttagtcgctttttgctgcaaatctttggtaaaaccaccaccttgcaccataaatccagggattacccgatggaagattgtattgttgtaataaccctcattgacgtattcaataaagtttttcgttgtaattggcgctttctggttatttaattccagttcaatattaccctccgttgttgtcagcttcacgtgggtttctcccaccgccaaagccagaggtgccattgcgctcagagagcatgcagttacaagtgctactaaaatacgtttaaacattctgggttcctatattattaaggtcaacaacacaaactgaatcaattctaataatctcttcaacatcgtgcttaatatttacctacatttacgctatcaatcggctggtgctttgaagaaaaatgtatcctttcaataacaggttaaattttatttcataaaccggagcgtcatcagtaacaaaatagcaagcttggttcaacccatcagaaatatgtcattatttttaatcctgtcaaccaacagtggctatcggtataatcccctttgccatatattcagcgcatttctcagggagataatcattttgaccatcaaaaaccacaactatcatatgacccgttttatcacgagcgcacctgatattcgccatctgcctcaagatatgggcattgaagtcgcgtttgccggtcgctcaaatgcaggtaaatctagcgctctgaatgctctgacgaaacagaaaagcctcgcccgcaccagtaaaacgccaggtcgaactcaactcatcaatttattcgaagtagaagaaggtattcgcctggttgacttaccgggttatggttatgccgaagtgccggaagagatgaaacgcaaatggcaaaaagcactgggtgaatatctgcaaaaacgtgaatgcctgatcggactggttgtactaatggatatccgtcacccattgaaagatcttgatcagcagatgatccaatgggcagtcgcaatgcaagtaccggttatggtgttgttgactaaagccgacaaactggcatctggtgcccgtaaaagtcaactgaataaggtgcgtgacgctttgctcgcgcttaatggggatattcaagtagaatatttctcagtcccgaaaaaaatcggtatcgataaactacatcagaaactggatatatggttcagccagaaagccgttcaagttgaaaaccatcgttaatccatcctctctttatacttttacgtgttaaattcagttgaaaaaaatgccccagtcaaaattgactggggcagctaatattcagctaaatccgattacgtgaagtaaaaggtctgaaagatagaacatcttacctctgtaccctacgccaataactctaccctattttatttattagaaaaagcctttttgtaatttattttcagaaattatctcgattcagccaggggttttgctcattttgacgccatgaaatgtagtttaattacatatttatgcgatctagatctaaatatgcattacatggacaacaaatcattacaagtgaatacaaaaaatttatttaactaataatattacttagtgtaaataaaataactgttacactttctcccaattgggcatggttttccgcataaacgccttgtggactaagaataaatccgatacgaccttaaccaggagaataataatgaaccaacatgataatgcttcatcaggtataaatcacaatagtaactctccattagaatgggaagaaaacgtctattgcagcaataacatagctctcgcatccaccatcggagcaaccgctatgttattgcagaatggcagtgtaattacctggggacttacacatcttggcggtcaagtcccacctgacattgctgtattacgagatatcgttagcctgagctcaacacaatacgcattcgcagctttacgggcagaccgcagcgtggttgcctggggagattcagttaacggtggacagcttcctcccgacattgctcaactaaaggatattgttagcctgagttcaacggctaacgctttctcagctctgcgagcaaatggtagcgtagttgcttggggagataatcgctatggtggccaagttacaccagaagttgcccaattacaggacattgtcagtgtaacttcatcaggtaatgctttcctggctctgcgggcaaaccgcagcatagttgcttgggggcgtttagctggcgtgctcccacccgagattacccaactacaggacatcgtcagtgtgcttggcaaaaacgacatgtactcaaccttcgcggccttacgggcaaaccgcagtgtggttgcttggggatattcactgtttggcggtcaggttccaccagcaattgctcaattacaagatatcgttagcctgagtcaaacaggtactgcattcgcagccctacgggcaaaccgcagcgtggttgcctggggaaatgcaagcaggagcggcacagttccgcctgccattgcccaactgcaagatattattaatttaatcggttcgggcggcacatttatagctctgcggtcaaaccgtagtattgtcgcctggggagacacgccaatcccatcagaaattgctgcattaagcgatatcgttgacctcatcacaacaagttcagctttcacagccctacgaacaaatcgtagcgtggttacttggggaacaatagagagtattgagcaggtcccatatgacgcagcccaagtacagaatgtcatcagcctgagtgcatcaagtgatgcctttgccgccctacgagcagaccgcagcatagtcgcctggggagatatatacaatggtggaaaaattccacccgaaattgcgaacttaaaagacgttatcagcctgacgtcaacaccccgtagtttttcagccttgcgagcaaacggcaaaagagtcggctggggaggcggagattttgtatcacatggtgaatatgactaatgcatcattacgcatggcttataatcacttaacatgttaaaccaaaggggaaaaaaggcttaacatactgcgttggcatcaggaagaaccaatgtcccaacgcagttgctgatattttttaaccttatcatgtaagttccgcagtttttcgatgttgtcaattgactcactcatgctgttgaatcgttaccctgcccacataacatccaacctacaccatcaactaatgactttttcctattacacttttttgcattaatacattaatattttttaattagagtagtcatctaacttagcccgtatagggacaagttttacaatacagactccctgtgggtaaaggtaaatccgatataaccttatcaggagagtaatatgaaccaacatggtaatttcttgccgggtacggatgccgaagacagttttataacacagcaatggaaatctgccggacatagatattatagcaacaataactacgattatattgtcactaacaataaagcaacagctatgttattacaaaatggcagtgtagccgcctgggaaagctccaactgggacggagacttatgggggccaagtacctcctgaaattgccgcattgcaggatatcgtcaacctgagttcaacacgtggagcattcgcagctctgcgggaagaccgcagtgtggtttcttggggagatctttattcaggcgggcgaatgccgtccgatattgctaaattgaaagatattattagcctaagtgcaacacaattggcatttatagctatacgggaaaatggcaagagagtagcttggggaggtggggataccagagctcatggtgactatgattagcagagctattaaacattgctatttattgtgaacagttcaaaaaaggctgagccaaatacacagctcagccatcgcgggttaattcagaatatcaatgcgcctgatcccaattgtcaccgatacctacatctactttcaatggaacatcaagcaccatactcttctccatcaattcacgaattttctgttctgcatattcaagttctgattcatgaacctcaaataccagctcatcgtgaacctgcataatcatacgaactttcggttcttcactgacaatccaatcatccaccgcaatcatcgcttttttaatgatatccgccgcagttccctgcattggcgcgttaatagcttcacgctctgctgccttacggcgcatggcattgcgagatttgatatctgacagataaagacgacgaccatccagcgtttcaacgtaaccctgctcttccgcttgtttacgagtacgctccatatacgccaatacccccggatagcgctcaaaatagagatccatatagcgttgagcttcaccacgaggaatacctaactgacgggaaagaccaaatgcactcataccatagatcaaaccaaagttaatcgctttggcactacggcgctgctcactggttacctgttccagtggcaaaccaaagacttccgccgccgttgcccgatgaatgtctttcccctcagcaaaagccttcaacaacccttgatcttgagacaaatgagccattatccgcaattcaatctgagaatagtcagcggccataatccggtaaccttcaggagccacaaatgcctgacgaatgcggcggccctctttattacggacaggaatattttgcaaattaggatcacgtgaagagagacgcccggttgccgttaccgcttggtgataggaagtatgcacccgtttggtcagcggatggaccatctgcggtaatttatcggtgtaagtggatttcaattttgccaacccacgatgctctaagatcactttcggcaatgcatgggtatctgccaactcttccagtacctcttcattcgtggatggcgcaccatttggcgttttctttaccaccggcaattgcaatttttcaaacaatatcgtctgtaactgttttggcgaagccagattgaaaacttcacctgctaattcgtgcgcttctttttccaactcatccagacgggcagtgatctcttttgaatgctcagccaaaatattggcatcaataagtacacctgtacgttccatgcgggaaagcaccataaccagtggcatttctgtattcaggaataccttttctagcgtcggcgctttctccaattgcggccacatagcctgatgcagcaataaagtaacatctgcatcttctgcggcgtacattgcggcctgttccaccgcgacctgattaaaagtgagctgatttttacctttaccagcaatctcttcaaaagtcgtggtcttatgattcaaatggcgttcagccaagctatccatatcatgccgacccatgcctgcaacgctattaagtacgtaagattccagcatggtatcgtaagcaatgccttgcagttcaatgccgtaacgcgccaacacgccacgatcaaacttaatattctgaccaattttcagcaggttactatcttcaagtagcggttttaatgcagccaacacaacttctctgtcaagttgttcaggcgcgcccagatagtcatgccctagaggtagataagccgcatcgccggcagaaattgcgaatgacacccccaccagattagcagtcaaagtatcaaggctgtcagtttcggtatcaaaagcaaaaacagacgcttttttcagtttctcaatccactcatcaaagctttgctgatcaagaatagtctgataattatcagaagagagtgtggccgccgcagatttatcctccgtcggagatgattcatcattaccagtggataccggttttttgcctttctctgccaaccaatcgccgtttgccacatcacttaaccaacgtttgaactcgtaacgagaaaacaactggtgcagtttctccgtatcaggctctttgactgacaaagcaacgcaggttttatccaactcaacatcggttttaatagttgccagttgataggagagataagcgacatctttatgctgcaccatcttatccgccagcgttttcgccccacggaaactgagcccggcaattttatccagattggcaaagatatcatccatgccaccaatcccttgcagtaatcccagtgcggttttttctcccaccccaggtacgccaggaatattgtcagaagagtctcccattaatgccagaaaatcgataatcagctccggcggcacaccatacttttcaacgacctcttccggccccaaaatggtgttattcatggtattgataagcgtgatattcggcgtgaccagttgcgccatatctttatcgccagtgctgataagtaccgcacgcccctctttttctgcctgtaacgccaaagtcccgataacatcatcagcttctactccgggcaccaccagcaatggtaatcccatagcttcaaccatctgatgtagcggttctatctgcgtacgcagatcatccggcataggaggacgatgagatttatactcagcgaacaattcatcacgaaaagttttgcctttagcatcaaataccaccgctacatggcttggtttgtactgcattatcaagctgcggagcatattcaatacaccatacatggctccggtcggctcccctgcgctattcgtcagcggagggaaagcatgataagcacgataaaggtatgaggagccatcaaccaaaatcaggggattgtctgctatctgagccataaatcttcttcattatctgtatttgttacgggtgtgataaggaaataggatgccacagcaagaagtaggaaacgaactttatgtgaattttcttttgaaacccgattctgatattcacatcctgctataaaatctgtggataactttgtgtatagatattacaagttttatttagctattgatcgttgataaaaaaaacttatcaaccttaggtaaaaaatcaatgacttataatcttagtcataaaactgtcatattgccttatagatcacggagttgtggatataaccagagtttgttttacataaaatctttttagcatgcattgtgccaaagattctcaagttggtgggtaggccgtttgtgatgtaacttacttttgccttaccagaagttgttcgatttcaatgtcaattcttgcttttttatatcctttataaataacttttcataattataatacactcactctttttattctctgctattcctgtagggacatgaatttaaaaacgttttcactttctcaagcaattgccacatatactgacagccatgatttcgtgtcaccgtttcatgtaaggattgccacagacgctcaattttattcagccagggtgaataaacaggtaaaaacaacagattaaatttaggatgacaagccagccaatctctgacccgtcggcttttatggatactgtaattatccaaaatcaaagtgagggtttcagcatgacaatactggcgttcaagttcttccaatacattgataaataaatgagaattcttatttaacccgtcagcataagtcacttttcccgtttgaacattcaggcaacctgcaaaataatgtttttggttttttcctggtgtcactatacgtttctgttgcccttttaaataccagtcagccccgatttttggattcagctcgatgtcgacttcatcttcataaaaaacgggatgtttttctgaacacgttgacaatgcctcggtaattttcgccattttttcatggtactcgggatcgggtaatttaagcgtcggggctgcccttcgccacacgatacccattttatgtaagtaacgatagaaggtactgatggataattttatgtttaataattcattgattttaattataaaaaactcaagactccagcgagaacgcaggcagcccaattgctggggagaatattgcaataaaaaagacagtaaaggataaagcgggattaaattccagacagcgggtctgcccacaggcaggcttttgagtccttccagaccatataaagtcaaccagtttatccagcgatagacagaagaacgactggcgcaaagggttttggcgaccagagagacagactcgcctcgatgcagcatcaatatggccatgagcctgcgagcataatctttatctcgggtgttctggataatttttttcatctggcgtcgttcattgcggggtataggtgctatgataggcataactcagtccgtttagtggtttgggattatctacaattgatcagattgcaaaaattggactgagttccctccaagtgttctactattttgaaaagttatttataagcacgtgagtagtgttaaatatgagtgaaaacgagatttacagacgcataaagcttgcttttgacaaagcgccaagaaaccagtttacggttgagttacatttgcaaatgctcaaacatgccgacgaattaaaacacattatagcgagggagttttgtgaaggtgtaagtcttcacccgagcttcggcacggagtttagtaaaatgcgtaatttgacctctcatcttaaagctgctggtcttgacacgaatcttctttgaacaaaatatttttggaggagggtattaatgagtgacgacacttttgaatatggcagccggtggctcaagacggattttcatctccatacccgtgcggataaagagttcaaatacacgggtgcagataacgactacgtaaatcaatatgtacattcgctaaaagatgccgatattggccttggtgtgattaccaaccataacaagttcgacatgtctgaatttaagagtctgcgcaaaaaggctcaaaaatctggcattggtctgctgcccggtattgagctctcggtaaaagatgggaacgcgggtgtgcataccctagtggtgttttccgatgagtggataagcaacaaggagcaaaaaaattatatccaggactttctcaatgtgacctttgccgggaaagctaattttgagcaggaaaatgcgcgttcgaatcacgatattctcaaaaccattaaaattttggatggttatcacaaagactactttttagtttttgctcatgtggaagcacccaacggtttatggggtggtttattgccgggtcggataaaagaacttttcgacaatgcttttgttcaatgcagagctttggcattccaaaaggttcgcacccgagatgagcgctctaagatccagcaagcactgggtgacttatatcctgctgaagtggaaggttgcgatgctaagaaccttgccgatatgtcggccagaaaggaagccagctatctcaaactcggcgcgttcagctttgaggctgtaaaatttgccttgcgggataagacatctcgcgtacaagctaagctacctgactatcaccattcgtttattcgtaaaatcagttttgaaggtgtgggcaccttgggtggcactgaaatctgtctatcacgggaactgaatactctgattggtattcgtggcagtggcaaatcttccgtattggaaggtattcgctatgccctgaatatcccgtttggcgataagtcctctgacgttgaatacaaagaaggtttagtaaagcacctgctatgtagtggcgggaagatcactatcgacgcgattgaccggcgaggccagccttaccaaatacgtcgtatattaggtgaacgccctgatgtatatgttaacgggcaattacagccgggtgtgtcgattcgagaaaccgtcctacatcaacccatttactttggtcaaaaagacttgtcgagtactggcgctgggtttgaaaaagacctcattgaaaagctggttggggaagctttaatttctgttcgccaaaagatagagcaaggccgtcagcgcgtagtggatgctattgatcaaattaaacgtttaacccgtgatgccttgcagaaacaagagtggctgcaaaaaaagcaggatgttgagtttaagttaaggttttaccaacaacacggcgtagaagccaaactgcaaaagcagattgattttgatcgggatgagcgcaaagcgcagcagatgatccaaggggcacagcattatctgaccgagctaaatagctttattgccagctttgaagatgaactgaaaaaccagattctgtataagtcagcacagaatcagcctttttttgatggcttttttgcggtctatcaacagttgctcactggctttgatgaaattaagcaagtggctggaagtgaccaagcgacagttcagcaattgcagcaaaagctggtgggctttcaacaacaaaaacaagcgttgaaagaagaatttgcagaaatcgagcgcaagttagccagtgagtttcaacaagcgggtgcacaagcaatcagtccgcaagagtttaagcagtttaaaagtcagctcgatcaggctgagcaaatgctggctgtattgaccaagagtgagcagcaatatacggatttgaatcaaggggttgaacgggaattagttcaactgaatagtctttggtttgaagaatacggcactattgagcaagtgctaaataaaatcaatcgagtggattcgccgttaaaaattgtgccgaaatttaaagataacaaagcggccatgctcaagcatattcaggatttataccgcggtagccgtattcgagaagctacattgcaaacagtggtggacgagttcagcgattttggcgcggtatggcgcgaaaaggataagttgaaagcgcagcttggtggttcattcgataccttctgtcagtattttgaagataatctagacgctttgctgacttggcaggtgccgaatgttttcaccattgaataccacggtaaggctctggctcatcattcattagggcagcgcgcatctgcattaatactgtttgttctaagccaacaagaaaatgatattgtgatcatcgaccagccagaagacgacttggataaccagacgatctatgacgatgttatcaagctcattcgtgagttaaagccaaaaacgcagttcgtctttgccactcataacgccaacattccagtgttaggcgatgctgagcaagtcatcgcctgtgaatatcaggatgataatatcaatattgtcagtggcagcattgactgcgcggatgttcagcagcgtatagtcggtattatggaaggtggtgcagaagccttcgagaaacgtaaacaggtatatgaagcatggaaacccaagagctcttagcaataattgcacgtgatgaagatagccgtcatcaatttaaagcagacgtcaacaatgcatcttcgttgggtgccgaaatggtagcgttttccaatggtactggaggcttaattctcattggtgttaacaatggcgatgggtctcgatctggattgacgagagaagatatcggtcgaattaatcaagtcatagcgaatgctgctacaaataatgttcgccccccaataaatcctgttactgaaaacattcaactccccgatggcctggtcattgctgtacatatagagcaaggcatcagtaaaccttatatggatactcagggctatgtttgggtgaaaaatggttctgataagcgaagggtgaccgctcgcgaagaattgcaacgaatgtttcaggaggcggcactgattcatgcagatgagacgctggtaagtggtacgtcagtagccgacatcgatcaggagttctttgattcgttttttgagggggaatacggagagagggttgaggagcaaggtgtatctcgctctcagcttttagaaaatatgaatttggctaaaaatggtcagttgaatatttgtggtactttgttgtttgcatcgcggcctcagattcgtcttcctgtttttatcgtaaaggctgttgccttccccggcgtagatattgaagatgagcactatattgatagtcaagatatcaatggcaagctgtcggatgtgttccaaaaggtgctggggtttgtattggcaaatatacgacatattcaaaataagcaaagctttaactcacttggcgagcctgaaatcccgaggattgttttagaagaactgatttccaatgcgcttattcatcgcgattactttgtgtcagcccccgttaaagtgctggtttttgcagatcgaattgaaattattagccccggccacttacccaataatttaaccattgagaacatcaagatggggaactctaatattcgtaacccaatcttggcttcatttgcttctaaggtattgccatacagaggcttgggaagtggtattaaacgtgcaatcaaagcatatccagatattgaattgattgataatagggaggggaatacattcaaagctatcattagccgaatgttactcaatgagtgactccaaatcacttcactgaatattttccgcctgtattttgtgacgaaaactggcaaaagcagaaatccggtacctgagcaatcagactgtcgcctactaagaggaatccccctcctgagtcacgaagtgcaaaggtgggggagaatgccaaattattacttctgacttaacaagaagttaacaacatctgaatagggtttcgcatagttatcagcagaagtggcatcaatgccgtcatttttcaccatatacttgccgttaacaaacattgccggtacacctcgcaattgcaaatcctgagcggctttttgctgcttaacaactaaggatttcaccacaaaactgctcatagcagcatcataatcctcagcagtcaccccggctttgataaaagcattgcgaatatcattcggagtcttaatagccagtgttttctgaatcccctcaaacagcaccggagtcactttgtcttcaacacccattgccattgccgcagcccaagcagtagtcaattctttacccagtggccctaaaaaatccacatgataacggacaagttttgtcccttccggtaaatgctgtttcaccgtctgaggcactttaaaaatctcttcaaactgataacaatggggacaatagaaagagaagaattctagcaccggtggttgatccgctaccggcgatttcaattcaacatactgttttccttcagtaaaattggcggcagatacgctaaatgccataaccattccgactaaagctaaccacaacttcttcataactatctccatgataaacattaatacatcgggttaagctgcaaaggtgattcctgcaacagcttaatctgttcagaaaaaagtgacgtctgttttaaccaaaaatcggtatctgccatccaaggaaatgctttgggaaaagcaggatcctgccaacgtcgagcaacccatgccaaataatagatcatccgcatagcacgcaatggttctatcaatgacaattccttcggatcaaaatctgcaaattcactataggcttccagcagtgtatctaactgcaatagctgttcctgacgagagccatgaagcaacatccataaatcctgaattgctgggccgttacgcgcatcatcaaggtcaacaaaccaagcttcgtcacgccacaagatattacccggatgacagtcaccatgaagcctcaatatttgccaatcatcgcgccaatttgatgctacagcatttatcaaatcatccaatactgccaaaaattgccttttctgtcccgcagggaccaactcacatgcagccaaatactgtcgtggttgatgcagatactcatttaacccgatagttggacgagaagtgaatttttgccgacggccaatctgatgaattctccctagcaaacgccctacatcctctaactgaaagagattatcggattcatactgacgccccccaatgcttggaaaaacggcaaaaaagaaatctttaaaagtcagtaaagtttgcttattaaataccaaaggtgccgcaacaggtaaatcagcctgttgtaacgccaaagcaaaatcgtgctcctcctgaatctgctgctggttccaacgtagtggccggtaaaatttcacaacataacgtttacgatcttcatccgtaaactgataaacacggttctcataactgtttaattctgtcagcccggaatcgacatacagcccggtctgcaccaatgcatccataatcaaatccggcgttaactcccggaaattaaaagcagactggtttgttagcacattctattctcttgattaatctgtaataacggctatacaaattaacagggatgaccgcccagagaaaggactgctctgtcaataagcgtaaagatgacccttttatcagcaagttatccggtgatcttatttaaaaacgcttacttaaccccacataatcaagctgaaaaaagttatattaacagtaataactacctcagttgataacttgaacattatgcaaccaaaaataagcggcgcgatccttgctggaggtcgcgccacccgtatgggcggcaatgataaagggttaatttttttaaataaaaaaccactgtaccaacatattgcagataagctatttccacaagtggatgaattaattatcaacgcgaaccgcaatctggatatttaccgacaaagtggttatcacattgttccagatttaacaccagacttctctggccccctttcaggcatgctgacagccctaaaatcagctagttacgattgggttatatttgttccttgtgatgtaccagatctccctaccgatttggtcattcgcttatggcagggaaaacagcaagcattggcagcctatgtaaatgatggcagccgggctcaccctaccatcgctttactacaccgcagtctgacttctcaattagaaaattatctggctaacggtgatcgtaaattgatactgttcatgcataagatcagagcgatagccgttcaatttgatgataatcccatcgtctttactaatctgaatacaccgcaagattgccaacattgggaacatatacaggagatcaaaaaatgagagccaaaccgcttccgctactaggtattacagcctatagcggaacaggaaaaactacacttctcaaacaagtgatcccactattacgtcaacagcaaatccgggttggtctgataaaacacacccatcacgatatggatgtggataaaccgggcaaagacagctatgagctgcgcaaagccggcgcagagcaaactctggttgccaaccagcaacgctgggcgttaatgacagaaacgccagatttgatgaaaatagatttgaactatcttgccagccgttttgatccagattcactggatctgattctagtggaaggttttaaagatgagccaatcaacaagatcgctctataccgcaacactcttaaccaccgattaaacgatcttcttgatcaacatgtgattgctgttgccagtgatgaacaattggagactattttgccacaattgaatatcaatcaacctgaacaggtagctgattttattgtcgaatggctgaatatggaacgttaagtcacttccgcctgcgcccagaacacaggcagaagaccaaaaacaactattgatgagggaataattgaccagctgtattgttaagacaacgatgctttttggtataaaggcataacttgctggtaaaccttatcgtatagatttacttttaacaagctgtatttttcagtcattgtcaatgttttaaatccatctgtttctctctcaaaagaaactgaaccgataattagctgattattagtcgatagaccatcaatacataaatcgaataattttttcgtcgtatgtggatcagggtcttgttgtttaggcgaatcaattaccacaggaagcatagggcttgttgacttatcttctatcgttttaagaagagcatagtgataagccaatattgctctaggagcacgactgccagtttcactcttagatatcggaccatactggagaatagttccaacttttgggtctttaatacctaactcagtttgtgcgaacttcaatgattctttaaatttttcattgatttcacttgttcgttttttatcatcgaactctgctatttctttcgagagtttggttctggcaacatctaattcacttattttttgtagcaactcattaatttgctcatcgaaagtgaattcaacctgcttacttgcttgagattttataacgtcttgaagagttaactgttctttaacttcttgaagcatacctttaagctcagagcttaatctttgagcatttttcaaatcttctttgatactggcaatttgctcatcatatactgacttttggtcatacaattcaggtatgatttgcaaaagcttctctctattttcaagtacagcatacttagcttctaaacttgccgatgtagatagagaatcgatgttattttcataaagttgtctttttgactcttctatctctgccactaattcgtctcgttgagataagactttgattagtttgattctgtaccctgtttcttccttatgcaagtattgacacttacgaagaaaacgctctaataattcttcataatattcaacatcaacatcaaaaagtactcttccgaatgattcttcgaaacgcttcttagctgcttccagagcttttaatgttgctctgatttctttaaggtcgatatcaattaaattgattttcccttgaagtttgtaatactccttgggttttacaccagcatggaagtttaaaatatttttctgccaatctttgtacattttcaaactactgaatgaatctaatactgtaccccatccgttatcttggtcgatatagaatggaagataaagacttgcaggttgtgcttgcccttgaactaaagtttcctttaagactaattctaaattaaagtcaaagatatctcgtacagtcaatgcaatatctgtacgagaattagaggtcactaagaggtgctcttgttcttctgtaatatcgaagatggaaatacgtttttcgtgacgaataaatgcatagtcacgattattaacgcaaataacaacttttgaaacaaagttatcatccttccactttttatccagtcgaacatcggcacctaatgtatgatataggctcttgataaagctagatttccctgtgtcgttctcaccagtaatgatatttatgtctggtgagaactcgaaaaagaagcctttcttatcacgaagggataatatgtgagcacttttaaagtagatgcttctcataccttacctccctctaatagcttctggattattgagtaaacaacaatacattctttctttcctgactttaaggccaatgtataatccggacaaagtgcatcaattttgtgaataattccagttacatacattttcaaatccgaataaacgctcgcctcatcgtaaaggttaattgcatattctagatatacagtcgacggattctttgtattttggttaaggtcgatacaaacttgtgagaacgtcgcttttagcggaataatctcaaaaagagtcttaccgaggttgttgaatatagtttccgccattttccaatcaggcttcatactattacttacattcaatgagtctagaacaccattaaatgctcgggatgaaaacccttttcgagatataaggtctgaaaaatcaacgatatcagctgattttaccttagatttgtttctacattctttttcaagcaaagctgctagcacatttacacttaatgtagtgtcatcaccgaatttattacaaaggaaatcgcacagtttaccttttaagtgtgtgatgtggtcatctaggcttaatgaggattgaacaaacttcaatatagaaagatcaatgttttcatcatcgagcttcacttggtctttgattgcttgtttgaagctaatcttatgctcatcttttatttcacttgcactaaataaagatttaccaccattcttctcacataaattaaatgacgcattagtcacaaacaatagctgaggcgagtagttacaaaagtttctatggtgaataaatagcttgccaattatagatattggttttctctttgtgcttttgtgtaaatcataagcagtccaatgtgattcactggtttttacctgagcaaaagtgaggtctgttggagagtattcatcatctaatattagaacatcatcatgatactcgaagataaatacatagttttttccatccagttcatattccaacatttgagacaaagcccaacaggtctgatagtcaaaccctcgttgagcaatctcaccacctctttcagactgtggaatactaatcaaagcttcagctagccccataaacttccttatgctttgccaaatggacatactcaatcacaatgcttattagattggatgtgaattgtagcataatcaaaaactggggttaccttattcttcttacaacacgcggtcagacaagtttcaaatgaatttcccagtccccgtgaacgatattattgtcaaatctcaacatcactacattgacataaaaggccagaaattactctggccttactaggtttttccagtgggagaaacgtgtgtaggtaggttttctacactaccccctcatagtaacaaactcttccgccgcagtgggatgaattgcaaccgtgttatcaaagtctttcttcgttgctcccatcttcaatgcaacagcgaaaccttgcagcatttcatccattccgaagccgataccatgaatgccaacaatcttctcttccggcccgacacataccaatttcatccggcacggctggcgatgttgagtgacagcggtatacattgcagtaaaagaagattgataagttttcacctgttcttcaccaaattgcgctttcgcctgaggttcagtcagccccacagtaccaataggcggatggctgaatacgacagttggaatattggtgtaatccaaatgttcttctggtttattgttaaacaagcgctcagacagacgacgacctgcggcaaccgcaacgggagttaactccactgcaccggtgttatcacctactgcataaatccctttcacatttgtgttctgatattcatcaactctgatgtagcctttttcattcaactcaacaccggctacagacaggttcagattatccgttactggttcgcggccaatagcccagataagggtatcaacggtttgttctttaccattttgcagttgcaaggtcaggctaccatccgcatttttacttactgattttggcaccgattctgtatgcaaagtaggtccttcggtattgataacttccaagagtgtttcaacaatcatcggatcaaaagaacgcaacggtgcatgttgacgcacaaatagatgggtttcactaccaagagcatgcaatacaccggcaatttctacggcaatatagcctgcgccaacaaccgcaacccgctttggcatctcttccaatgcaaaaaaaccatcagaatcaataccatattctgcccctggtatatcaggccacacaggacgaccacctgtcgcaatcaaaatatgatctgcggtgattttttcaccattcacttcaacagtatgtgcatcaacaaaacgggcaaacccctggatcacatcaactttattgttacccaagccacgcccataagactggtggatacgatcgatataagccgtgcgactggcaatgagtgtcttccagttaaagcggttgattgtcgcatcaaagccataatctggcccatattggtggatagattcagcaatttgcgccgcatgccacatcactttcttcggaacacagcccacattgacacacgttccacccaatgccttagcttcaattagggcacatttctgcccatacatagcggcacggttaattgatgctatgccaccactgccaccaccaatcgctatatagtcgtaatgtttgctcatccggattgtttccatctaatcaattcaagggggttaatacccaaagcctattatggcaaaaaatatcaagcagtcgcgatggttttggctctcgctgccattgttaaaagctattctggcaccacccatttaaccaaggtgtgaccaattccttctggcaccagaacctgatgtaaccacggcaacactgatttcatctgctgttccagtttccaaggtgggttaatcactatcatgccagaggcggtcatgcctcgttgatcgctatcaggccggacagccaactcaatttgtagaatacggcgaatgcccgttgcttccagctctttaaccagtcgtttaatctgctggcgtaataccaccggataccacaacgcataaacaccggttgcaaaacgcttataaccttcctgaattgcctgtacaactgcctgataatccgatttcagttcataaggaggatcaatcagaatgaatccgcggcgactcagtggtggcaattgtgattttaattgctgataaccatcttcacgcaaaactctggcgcggttatcgcgggagaattcattacgtaataaaggaaagtcactcggatgcagttctgtcagattgaacttatcatcttgtcgtaacaaatggcgggcgattaaaggcgatcctggatagtaacgtaagttgccactctgattcagtgcagctactgcactcatataagcgttcaactcctgcggtaaatcttcacgctgccaaacgcgggcaatcccttccaaatattcactggtacgttcagcatgttcactactgagttgatagcggcccgcaccggcatgcgtatccagatagagaaaaggtttctctttttctttaagagattcaatgatcaagctttgtacagtatgcttgagcacatcggcgtgattgccagcatgaaaactgtgacgataacttagcattaatttcagaccccagagcagagaataggttgattgccagatggagtacctgacaactaaaaacccatcccagtagatgggacagatggtaaggccctattatagccctattagcgacaaaaatgtcagactcctcatctttctcctggagatccctttagtcatattaataaaaatttaggataagtgaaaaactctacccagaccaatatgatatttaataagtaatactatttacatttccactaaaaatcataagtaatacttacgtaatgacaaacaacaagaattgtgcaattaaaaaaacaagacattaaacgaacaattaaatatacaagatcttatgttgatgttcacaaaatcaccaatcaggaacagagattgaaaaatgttaacactcgctatatggaaaaataattaaaagaaaagccagaaaaaatgacttaatgttatcgagaacattaagtaatatcgttaaatagtacgtgtaaaaaatgaaagggagagaaagaaaaaaaatcaaaaaagctgaaagaagttgaagacagttattaaaaatcttcaacttaaaataaagaaaaattaagcttttcagccaatgaagagatatttcattggctgaatgattatattacctatcaggcaacaataggtgcacgccaatcatctgcgccggaagtacctgcggttgtatgctcccaattaatcttacgataagacagagaaacacgaaccagctgagtaaattcagcttttgttgggtcctgacaatgaggcatttggcaatcaatgtcgataatagtggcatcttccaactgcgtcgtgaagaaatgctcttgtttcccttcaacagaagtgcgataccatttcaatactacactcgtcagcatttcacccgaagccaatgcgttataaagcaatggaacagatttatttaatgcaactgtaaaacggaatggtttatgagcacgctgacctgaaggctgacctgattgaggatcagtgggtacggtgacgacatgatcaaatgcttgaactagcatttcatcttcgtggccctgaacgtaaatattacccactgattcagcagtgaatgaacccgcagtaatattaccctgtgtttttccggtgatagaaatataacatggagttggcattgcaaatatcctttatagagattgtgtcaacattaaggtaacgctcatattaatttcaatagtgattatttcatcttggaagaaatcacttgcgaatacattgaacgctaaaatgaataataaataccaacccgctcgtttcaaaataaaatctaaattgcaaaattgttaatccatcaccaacaaataaaaacattataattaatgccatttttaaaaaaaactttgaaattgacttaatttacagaacaattaactgttaacactcatttaatctagagataggatgacatatccatatgaaatataaaaactttgataattccaacctaaattatattttgatcaattaaaaattgataactggatcaaaaaattaaacatctccacttggttaataacggaaataatattttcaatatgaaactaactctaatatgtaaacaaaaatacatctagaaatactttgttacaaaatgaaacaaaaaatcattaaaataccttttatagagtactttaatcaagaagtggattaagaaagcatcaagtcgtaactgattgccaaatcaaataaaatcatcaaaaggctaaatagaggggtatatctacatatattttagctttacaataaaaaaacaaaatgcgacactccgctttgcagatcgctctatattgatgctattgttcgatgaataagaacattctgaatgtcgtatttatctatatgctcataaaagccagcttactacccaatttaatgcagtgaatctcccgttttttaatctaggggaattttatgttctccatcacatataagtaggtatcaagggcaactctctcatcaatattgttatcagataattcctaattgcctaattgtattacccaaaggattttaatatgagtaaaaatagttcaggtagcgtagcgccaaaagaaaggattaatatcaaatacgttccgaataccggtgatcaagtagccgagattgaattaccccttaacctacttatcgttggtgacctcaaaggaacaaaagaagatacgccaattgaagaacggcaagctgtttctgtgcacaagaataactttaatgccgtgatgaatgaagccaatatcaatctcacctttagtgtccccaatcgcctcaacgataataacggagatgacctgccaattaacctggaaataaaatcactcaatgatttctcacccgataacgtagcgaagaaagtgcctgaattaaataaacttttagagctgcgtgaggcacttgtcgcactaaaagggccattaggaaatattccggcattccgcacccgcttacaagagttattgggtgatgagaaagtccgcgaacaacttctaaaagagcttgaaatcgtcaatcaaaagtaattgactgaaaaggagtttttaacatgtccttgcatgaagagagcagtacaacattaaccccagggtccactacctctttgcttgacgagattatgtctcaggcaagaatgacgccggaaaatgatggctaccatatcgcaaaacaaggtgttgccgcttttatcagcagcattttggataccggtactaacgaagaacctgtcaacaagcttgtcgttgatagaatgattgttgagcttgataaaacactcagcactcaagttgatgaaattatgcatgccaaagagttccaagagctggaatcatcatggcgttcactgaaattgctggttgatcgtaccgattttcgtgaaaacatcaaaatcaacatcatccatgcgaccaaagaagagttactggaagatttcgaattttcaccagaaatcatccaatcaggcttatacaaacatgtctactcaacaggttatggccagtttggcggcgaaccggttgcggcggtcatcggtaactatgcgtttagcaatagctcacccgatatcaaactgatgcaatatgtcagcgcggttggcgcaatggctcacgcgccattcctctcttccgttgcacctgatttctttggtatcagtagctttaccgaattaccagcgattaaagatctgaaatctgtcttcgaaggcccggcacacaccaaatggcgtgcgctgcgcgaatcggaagattcacgttatctcggtctgacaacaccgcgcttcttgttacgtctaccttactcaaccgtcgaaaacccaattaaaaactttaactatcaggaagatgtcagcaaagatcacgaacatttcctgtggggtaataccgcttatctgctggcaacttgtttgactgacagcttcgccaaatatcgctggtgcccgaatattatcggcccacaaagcggtggtactgtcagcgatctaccggttcacctattcgaagcaatggggcagatccaagccaagatcccgacagaagttttagttaccgatcgtcgtgaatttgaattggcggaagagggttttatcactctgacgatgcgtaaaggcagtgacaacgccgcattcttctctgccaactcagtccagaagccaaaagtgttcccgaatacccgcgaagggaaaatggcggaaaccaactataaattgggtactcaactgccctatatgttcatcatcaaccgccttgcacactacatcaaagtgttacagcgcgagcagattggttcctggaaagagcgtcaggatctggagcgtgaactgaacacctggctgaaacagtacattgctgatcaggaaaatccaccaacggatgtccgtagccgtcgccctctgcgttctgcccaaattcaagttttggatgtggaaggcgatccaggctggtatcaagtggcaatgcaggttcgccctcattttaaatatatgggagccagctttgaattgtcactagtaggccgtctggataaggagtaatgggtcatggctgcgctgcacagttggaatagagaaggctctgccagcctgttcgagcgtattcaggggaagaactctggttcttcccgccaatcaagaatgcgtgagctgctcaactccataaaacggcacctgaatcatgttctcaatactcatccgggtgcctgtcagagtgcggctgatcttggcgtcattgatctcaatgacgctacaaccacggcaactgactttaaacagagtattgagcaagcaatagagcactgcatcacaaattatgaaccaagaatatcgtcagtcactgtcaatgcaatccacgatgatagtgatccgctgttgttacgttttcacatcagcgcccaggtatccctggatgatattcatgacgctgttgaatttaatattcaactggataacaaccggcgttattgcctagagaggactcaataaaatgtcacttgaaaaatattttagagaggaactggattaccttagacaattggggcgacaagccgcaattgaacatcctcacctcgcctcatttttgtctgaacaaggctctgacccggatgttgagcgtttactagaaggatttgcttttctcgcaggtaatttacgggcaaaaattgatgatcaattccctgagctgactcatggattgttacacatgctatggccaaattacctgcggccaacgcctagcatgaccattatccaatatacacctgatgatagtgccatcacaaaagcgacgcagatcccgcgtggaactcaaatcaaaagccgtccgctgacggatgatagcgaaaatgatgaggatgaagataattacttaagcaataccaatactcaaaaaacaggccaagacgatcatcgctgtactttcactttatgccgtgatgtttggctgtttccgatgtctatccgggacatttcggtcaataatagtaatgagcagggtgtcatcggtctgaatttcacctcaaaaacagaacttaacttacaagaactgcaacttgataaactgcgtttttatctaagcggcgatgattacagcagtacacaactctatttctggcttagttattaccttgaagatgcaaaacttgttgtaggcgataccacgatttcattaccggattttgacttcgttccagtgggttttaatcgggaggacgccctattgccttacccgaaaaatgcctatatgggttatcgcgtcttacaagagtacttctgtttttccgaaggttttctgtttttcgatgtcactggcatccctaaattaccggcaagtcttaaagccacagatttcacgctaaatctctatttctcagaagctctgccgccagaaatcaaaatccgtcaggatacttttcggttgcattgtgttccggcaatcaatctctttccaatggatggtgaagttattcgattggatggtagccgggacgaatatccattgagagcgagttatagccatcctaatcgctacgatattttctctattgataaagtagaaagctggctagtcgggcctgatggtaaacctaaactaagccgcgatggtagacgatcttatgtgccattcgaaagttttcaccatcaaatcgaacatgaaagcgaactcaatactcgctattttcgtatcagaatcaaggaatccccatttcgcaaagggcttgagcattacatctcttttgtccgtggtgatgaatctcaacttctattaagtgaggaaaatgtctctattcaactgacgtgcaccaatcgcgaactgccacttcaactccgggtaggtgatattgattaccctttatcgggaagctcgtcatttgcgacattccgcaacataacccgcccatccgttccactctatccattgatgagcggtgagtatcactggtcgcttatttccaatatgtcactgaactatatgacattattggacaaagacgcactaaaggcggtactaagaacttacgatctccccagccgatataaccgacaatcctcacgctcatcacaaaaacggctagatgccattgaacggattgaaacgaggcaaatagaccgactatttaaaggtctcccggtacgtggttcggaatcaacattgtatatccggcaacaggctttctgttctgaaggcgagctttatctgttctgcaacatactgtcacgcttttttgccttatatgccagcgttaactccttccacatgttgaaggtgatcaatttagataatcaggaatgttatcaatggccggaacagacaggtcaacatgcgttgatgtaacgagtgaaaactcgccacaaaatcagatattagatgtgtcaaggtataactttcatcaattggtcgaattgttcaaccaattggcggtagcgtgggaaaaaactgggcaaaccaaccgtccggaccgtgaagcaattcagtttaaatccagcgccagcctggctttcccaaccagagatattgtctctgcgaaacgttctaaagagggacgtttccaggtggaagtctcttttctggggctacatggcagccaatcgcctatgccaggttattaccttgattcgttggcatgggaagacgcccaggatgaaaatcgactgactaacttccttaatatcttcaatcacagctctattgtcatgctccatcagatctggcggaaataccgttattacatctgttttgacaaaaacggacaagacgatttttctcagcgtatgtttgctttggtgggacttggcagtaatgtgaaccgttctcatttaaatatcaaccatagcaaaatgctggcctatgccggcttattagccagccccggtcgatcaccggaagtgatatgcagcttggtttcacactgttttgatctaccggatgttacggtacacggctggcaaatcagaaaaatcgctatcgagccatcacagcaaaaccgtttaggtggaatgctgaaaataaggggacagaaacaaaaagttaaacagtctgtaataggaaaaaactttttcctcggttcatgggtgagaagctgcaatagtaaatttattttatgtatcaataatctctctcgtgaacacttcttgtcatttctcccagacggcaagaatttcctgccattggtaatgtttctctgttttgtcctgcgtgatcagatggcttgggatctgcgtcttggcttggccgaaaaccaagcgggcggcatggtacttggcacgaaattaaacaataacctagggtggaccagctttcttggcgaaccggaaaagaaaccctttatcacgatttcagtgaatggataaagacgatggaaaaacaacagccaactctctcattacgagtgatcaacagcgatcaattggaaagcggcaaagcggctagctgcctattctcgactcaaggtggcacagtcggcagcagtgaaagccatctttggtccgttcaagatcaacaaggtaatatcaatccatcacaatttactatccagtggcgtgatgacgcattttgcttacaaatgattgcgggtcccctgtttgtgaatcagtcacccttgacttctggcgccggtttcatccgcctgcaacaagcggatgaaattaccattggtaaactggtgatcaaaagctatatcagtttttccgacacagatcgtattgatccaatgacagtatcaccggaatcactggtctccagctatagcaatccactggacgctatgatggaaaaagatcctgctcaagattccgctttcactgatcatggttctttggcccccacgatcaaacacgatttcagccatgatccactcaaggttctcgatagcgaaaatctgaccactctggaccagacgtcagtgagtaacgaggtagaccaaagcctgcaacaagaccactaccgcaccccattatttttctcttccctctcagataacagaggcaatgctatggatcaggattttgttgatttacccggtatctcttcgccttttaatgaacagtatcaggacatggaacagcaacatgttgctatcacgccattgatgcgagggttgaacacacaattgcctttgcataacagccaacaagctaacgactttctggaagaaatgggtaaaaccatgaaagcggccattgaaggtctactggtactgcaacgtacacagcatgggctgcgtgataaacaattgcgccctattgaagataatccgttacggctgaacatggattacaacaccaccatgcaagtgatgtttgcggatcaaaaaagcccggtacatctctctgccccctccgctgtcgctgaaagcttacataacctgcaattgcattatcaggctaaccggattgcgatcactgccgcattgaacaccatgctggatgctttctcaccggaacacctactgaatcgttttgcccaataccgccgcagcaatgaaacacaggaaaaagatgcaacctgggcatgggaaatgtacaccagttactaccgcgaactggcttccagccgccaacaagggttcgaaaaactgttcggtgaagtctatgagcaagcttatgaccgtgctctacgtcaaggtttagaggatagccagtaatgaagcgctccggcggtaatacctcatggttcggtagtaataccgtatggtttgtattgctggcagcgctgatgttaagcggttgtagcagtgcatggcaggcaacgaagaaagtcggacaggtagtctgggacccatcaactccagttggtcaacctgcgaacttaccttccaccgtcgcgatcactttgctggcagaacctgatattaaccccaataaaaatggagaagccactccggttgaaatgcatctgctctatctcagtgaagattcccgtctacttgccgctgattatgaccaactggcgagtgacaagctggataaagcactggggaaaaattatatcgaccatcaggattacaccttattgccggggcagtacaaaccactgccagtcatcccgctggaaaaaaatagccgttacatcggcgttatcgttcgctatgccgatattaatcaatccgaatggaaaaaggtcatccgtgtgaaagacacaggacagcaataccacattctggtgcatatcagagcgaacgaagttgaacttagaaaagaggagcaataactatgccaggcaagaatcgggtgatttggcgcgaaggattattcatcaagccacaacactttcaacaacaacaaaaacataatgactatctggctcatagccgccagacgtccttaactagttatagttatggcttcagttctctgacactggataaagaccttctcgctctaggacgcatcagtatcatcgaagccagcggtatcatgccagacggcacagtgttctcgattcctaatcaggatgcaactcctcaaccgcttgatgttgtgaatattcacgagaacaacagtaaagatatctatctggcgctaccaatagctaacgatattctgaatgaaatctctcattcagaatccaatcatgcaggagctgtgcgctaccgtgaatacatggaagatatccgtgatttgcatacagatggcggtgatatctgtcaagtcatgctggcacaactgacgccggttctaaaacagggttcagaagatctcagtgctttttccgtactcccgctatgccagataatagaaaagcgccctaccggaactatcatactggatgaagatttcgtaccaacctgtacatccatcagggtctctactcaattaaaaaattatatggatgaaatagatagagcgatgacagaacgaggcagatcactcgctaaccggattggttctcccggacagcaaggagtcgctgatgttgctgaatttatgatgctccagctagttaaccgagttcagccgtggtttacccactacgcaggacaagccattttgcatccacaagattttttcactcagctgatccaaacctgtggtgaactgagaacattcactcatgaatcccgtcaggtcggcaatatgccaatttacaaacacgacgatctgacggaaacattcaaggaagtcatgatcctcatgcgcgaagcaatgggcgttgttctgaccccgcgagcgattccaattaagctacaaactcaagccaatggtatccgggtggcccacatccatgatcgcaatgttttgacgaacgcggaattcattctggcaatccgcgcacaagttccacatgatcaattactccgcaagtttgctcaacagactaaagttacatcggctgaaaggatccgcgaaatggtcagcatccagttgcctgccgtagcactggcggcgcttccctctgccccacgtcagttgccttatcatgctggttacacctatttccgacttgagcaacaaggcgacgcatggaaagacattctaaaaggtaactccatcgctttccacgtttcaggagaattccctggattagatatgcaattctgggcggttaggaatgggagtgcctaatgaaaactgaaaccataaatggcaatcctattccgacgcaggaggtcactgataatgccgtgcatcttcagtatcagttaccgctgcgcggagaaagcctaaacccgatgatcgatgccgctacaccgctgctcggcatggtcatgcgtctaaaagacatgggcgaacaaccgctgccggaccagctttatcaacaggtcgtcactgatattcaggcaatcgaacaacttctacaaaccaaaggctatgagccgggcgcaattatctcttttcgctatacgctctgtaccttcattgatgaaaccgcattgggtcatggttggaacagcaagaatgagtggttacaacaatcactactggttcgattccataatgaaacctggggtggcgaaaaagtttttcagttgctagatcgtttgatgggtgaacctcagcgctatcaacatctgctggagtttatctatctttgcttctgcctcggttaccgtggccgttataaagttgcttcgcagaaaagtgatgactttgaacgtttattccgtcgattacaccaacaactgcacgcgctgcggggagaagctccttccatcattctccacaataacgccaatgagcgtaatgatcgctatcgcctgggtaagcgtctgactattaaacatctgttctggagcggtattacgctgctcgctatcgtttatagcttctacgctatccgtctgcacaaccaaacccagaacatcttacaacagctaaataacttactgagctaggaaagaaccgatgattcagattgatctacctacactagttaatcgcttaaatccgatgactcggcacgctctggaagcggcggcagcgcaatgtgtcagccaacagcaacctgagatcacggtttcacagctattgttgcaaatgatcaacacccctctcagtgatgtcagagcgatcttcaatcaagccgaagtagacagcgatttgctgaaagaacaacttgatcagatgatccctcaccatcaagcaatggttcaggcttatcctaacttttctccaatgttagtggagtggttacaggatagctggctgttagcatcgactgagatgcaacatcaggaattacgcagcggcgtcatgctgatgaccttgctgttcagcccgctacgttacctgacaccccaatccgcacgtcttttatcgggcataaaccgcgaattgttacgccagaattttacccaatggaccgcgggctctgctgaacaaccggttgtggaaaacgataaaaacggacaaaacaaagctgccgccgggagtgatagcttgctcgcccgttttactcaaaatatgacagaacaagctcgtcagggaaaactcgatcctgttctatgccgtgacaaagaaattgacctaatgatcgatattctctgccgtcgccgtaaaaataacccgattgtggtaggtgaagcgggcgtcggtaaaagtgcgctcattgaagggttggctctgcgcattatcgacaaccgagtgccggaaaaactgcataacagtgaattgatgacactggatctgggggcactacaagcaggtgcggcggtaaaaggtgaatttgaaaaacgtttcaaaggcattatgaatgaaataaatcagtcatccgtaccgattattctgttcatcgatgaagctcataccctgattggcgccggtaatcaacaaggcggactggatatctccaacctgctaaaacccgctctggcacggggtgaattgaaaacaattgctgcaaccacttggggagaatacaaaaaatatttcgaaaaagatgcggccctctcccgccgttttcaactcattaaagtggccgaaccgaccgcggaagaagccatcattattatgcgtggcctgcgggcaatctatgaacaatctcatggcgtattaatcgatgatgaagcgctaaaagcctctgcggtattaagcgaccgttacctctctggacgccagttgccagacaaagccattgatgtgctggataccgcctgcgcccgcgtggccatcaacttgacgtcacctccgcgccaaatttctgccctgaaaaaccaactgcatcagcaacaaatggaatcagacgtgctggcgagggaacagcgcatggggctcaatcagcatactgatcgactggatgaactacgacaacaacagcaggaaaccacagagaaattggctgcactagaagccagttggcagcaacaacagcaattagttcagcaaattattgaactacgccgtcagctattaaccgacgaaacagaattcactaacgaaacaaaacagagcgaaacatcggccgaaatgacaactgaagagttgattgcacaattggctgaactgaatgaacagttggaacaattacagcaacaacaaacgctcatttctcctcacgtggataaaaaccagattgcaacggttatcgctgaatggactggcgtgccacttaatcgtctgtcacaaagtgaactttccgtggtgacagaactgcccatgcacctgggacaaagcatcaaggggcaggatctggctattcaatgcctgcatcagcacttgttgaccgccagagctgacctgcgccgtcccggtcgtccattgggcgccttcttgctggtaggacccagtggcgtcggtaaaaccgaaaccgttttacagattgccgaattgatgtttggcggacgtcaatatctgaccacgatcaatatgtcggaatttcaggaaaaacacacggtttcccgcctgatcggctcacctccaggctatgttggctatggggaagggggggtactcaccgaagctattcgccagaaaccttattccgtcgtcctgcttgatgaagtggaaaaagcgcatcctgatgtcctgaacctgttctatcaggccttcgataaaggtgagttggccgatggggaaggccgggtgattgactgtaaaaatgtggtcttctttttaacgtccaatttgggctatcaaactatcgtcgataatgccgataaaccggcagagatgcatgaccggctttatcctgaactggccgctttcttcaaacccgccttactggcgcgaatggaagtggtgccttatctgccgttaggacacgacaccctgaaaaccattattcagggcaaactggcgcgcctcgataacttattgcgtcaacgcttcaatgccgacgtcaccctgagtgatgaggtggttgaagagatactgcaacgggcaactcgtactgaaaatggcgcccgcatgctggaatcgatcattgatggcgctttgttgccaccgttatctctgctgttattgcaaaaaatggcggccggaaaacagatccgcactatccagctcaccgttaacgaccatcagttcaacgcggtggttgaggagataccatgaaacaacggctgaaaagcgcattagcattactggaaaatgactctatcgagcaactggttcatcactttcttgaggtgaatcaccaacgccagcgttttgatgccttgctggtctctctgcttaacgtgaatgaaaaccgtctggaatgctaccggttgccggcgccaaaccagataagcgcgctgcaactggatgtcaatatcggtgatatcaaccatccactggtccaaatcttgtacaaaggcacccccacgacgtggggatccctcaatcaaggggtacgtatcgaccatcgaaactttcgcctcttcgtagaagaactccctcatcgctgcggcctgcatgctattccgttgtttaactgcaacgggcaagcgtgtggcgtgattgctgttttcgccaaagatgtccatcgttttgctgacgatagcaacatgttttacatctactgccatgtcatgcaacaccgattgaaaaaattgcaggaactggaacaactgcgtgaccaattacgccagatccgccaggtttttcagacacagcgccagaaagaaaaacagcttgatgaattgctggcttcgttaagcaccacagccgaaaacaaaacctcagccagcgtctctcacgattacagcaaaatcgacaatttacctcaggcacttgaagagttcgaatgtgcagtactgatacaacgccagcatatttacggcaacaacaccaaacagattgccgccagcctgggtattgcaccccggacactgacttacaaactggcgaaatacaggtgtaaattatgaattttctgctactggtcagttcattaatcgcctctctgacaggcacccctgatactcagccagatcaggaaaccccaacagcgccttcactacccgctttgctgcaatgccgggcagaaccgtcaccgttggtcagagtcgattgctacgaccgtctattggataaagtcgataatattgccgttatcccgttagaaaaaaccggcccggtctggagacaggcaatggaacaggagatgaaacgcactgaccattcaaccggttttatcaccacccaatctgacagcctaccgactcgcgtcatactgaccacccccgcaatcggtgttccaccaccccggccagtcctgatgctgagttgtatcgataacattacccgaatacaaattgccctggctaaaccacaagatagcggcacggtgatgatgtcgacggaaatcacccaattcagtgctgactggttcttgcgggaaaacggctacctgctggaatccagccgtggactgccgggcattgaagaactcaaacgactgatgacaggaaaaaccctgaccatcaaaaccggcaacggaaaccgcatgacattcaacatttctcaactggaacaggcggtgaaacctttacgctccgcctgtcgctggtgatccccatggatatcaggaaacaatttgactggcagggcctcctgctgacccccctgtcggatgaactcatcagccgggcgctggatgaaaacgaacccgcctgggaatatatcgacggggagatggttaagctgggatcactggcccattccagcctgaatattgaagagatccagcgtcaggcgctgcaactgttcagcgaaaaaagcaaagatttcagactgatggttcatttgctgcggacactgcaacacggcagtcatcccgctgaactcatcctggcaatggagctgttagccgattacatcccgcattactggcaggcagcctggccacacaaaccgcagctcaaacgccgcctggcgcaacaggtgattaaacggtttgacgctgcgcaacccggcttctgcgaacaggcggatgagacgcagcgcgaagaggcgcagggcgcactggcacatctggcacaatgctggcataccgatgaaccggctctggctaaagagatcgaccagttacgcccccgctatgcccgtaaacctcagcccaaaccggcagccgcgccggctgaaccggccgaaacgacagcaccatcggcaaacacttcagcactgacatccccccccataccggatgtcaccgtagacagtgccggtgaaaaagcctggaaacagacgctcctgaccgtggctgacctgctgtgcgaacgccagcctgattcccctgtcggttaccgtctgcgtcgttatgctatctggtacaccctgaccacagcaccgatggcgaatggcaccggcaaaacaccgctggcaccgacgtcggcagaccgcaccgccgattatctggcgaaactcccggcggcggataacgccctgctgcaacagatagaacagagtctgaccctggccccttactggctggacggacacgctctcgcggcgcaggccgccggcaaactgggttaccacgccgtggctgacgctatccgcgatgaactccgggcctttcttgaccgtctgccggtcctgcaaaacctgtctttctccgatatgagcccgtttatctccgacgccacgctgaactggctgcatcccccggcgaccgccaccgtcagcagcggctccacgccggaacaggacgccatctggcactgttttcagcaacacggactggaagccgccctccacgccgcggagcaatatcagcaacagctgaccgaaccgcgggatcaattctacggtcagttactgacggcccagttactggagcaggcgggcatgcacgcgctggcacaacaacattaccgccagctgcgccaggcaggacaacacctgtcactcgccgactgggaacccggcctgctggcggccctggcagaaaaagccccgatgaccgcccccgccaaggcgacgaccgcaaacaggagcgttaacccatgaactggctttctctgctgctcaacaatatcaaaaaaccggcgaggccgcgtctgccgcccctgaaagccaccgcctcgctgatactggccctcctgccctgtctggccctcatctggctctggtggtggggccccggctggcagtttaagcagacgcatccgctggacaccctgtctgcccgctggctggcgacggtgatcatcctcctgctggccctgagttttatcgggataaaaatctggcgccgcctgcgccagcttgaaaaacttaagctggagggggaactgaacaccgtcgatccggtgcgcgccgatatcacccgtcaggaccgttatctccatcactggaaagcgcaactgcaacgccatctggggacccgggattatctctaccagcgcccctggtacctggtgatgggtaacaccggcagcggcaaaaccgccctgattcaggccggctgccggctgactgacattgccgccccggacaccctgagcggggaagaggcgctgcccctgcatctgcgctgctggctgggggagaaagccgtcatcattgacccggacgggttccttatcgaccagatatcgccgccggacaccggcaaaccccagctgcccgcccgcctgtggcaggcgctgctcgtctggctcaccgaaaaccgtcagcgccagccgctcaacggcatcatcctgacggtggacattcaccgcttactgaccgacaacaaagcgcagcgggaacgggttattgccgcgcttcacctgcgcctgcaggatctgcgattaactctgcatcatcctctgcctttctatctggtgctgaccaaactcgaccggctgcacggtttcagcgccgctttccagtcgctggacagcgcgcagcgcgcccagatcctgggcgtcacctttagcctgaatgcgcgggatgagcagagctggcgcactgagctggcccagttctggcaccagtggatgcagcagctcaacgcggccatgccggacatgatgctcaacaaagtcgatatcagtcagcgcagtccgctgttcagcttcacccgccagatacaggggctgcacagctatctggtgccgctgctggaggggctcctcgacaacagcggcccggcacagccgggcctgcggggggtttatctcacctcgtctcaacaaatcggccagatggatgacctgtttacccagtctgccgccgtgcagtatcatctggggccgcaggcttttcccacctggccggtggcggacaccgtgccctacttcacccacgcgctgtttgaagcggtcctgctggccgaaccgaatctggcggctgaaaaccgccggtggttaagccgccaccgccacacactgctgaccttctccgccgtgggtgccgccgtggtgctggccctgtggagcggctggcactattactatcagcagaactaccgggccggtgacgaggtcctggcgcaggccaacatcttcctgtcggtgccgccgcccaccggcgaagaccgtctcggcaatttacagcttcccctgctcaatccgctgcgtgaggccacgctggcctacggggattaccatcagaaagggctgctggcggatatggggctctatcagggcgcagcggtcggcccgtatgtggaaaacacctacctgcaactgctgtctcagcgcttcctgccggccttaatgaacggcctgctggatgacctgaaccgggcaccgaaaggcagcgaagaaaaactggccgtcctgcgtatcatgcggatgctggaagatggcagcggccgccataaatcactggtcgaacactatctgcaggcgcgctggagtcaggcgtttaacggccagcgcccgttgcaggcgcagttactgacgcatctggactatgcgctggatcacaccgactggcgggccgcacgggaggcgggcgatcaggccgctatcagccgctttgcaccttaccaactgccgctcatcaatgccgagaaagaactgagtcagctctcgatttatcagcgggtctaccagaacctgcgcattaaagcccaggattcactgccgccgcccctcaacctgcgcgaccagattggcccgggctttgaccgcctctttatggccaataatgacaagcaactgattatcccgcagttcctgacgataaacggcctgaacaactacttcgtcaaacaggacgaccagctgatcgacctcaccgtcatggacagctgggtgctgaacctgtcacacaacgtgcagtacagcgacacggaccggcaggaaatccagcgacaaatcactgagcagtacctgggagactacacggccacctggcgcgcggccatgaacaacctggatattcgtgatttcaccgatatcccgcaggccctcagcgcccttgaacaggtcatcagcggcgaacagcccatcagccgggccctgcaaatcctgagcgacaacacccgtctgccggagattaacgagacgctgccggccaaagcccggcagccgttacgtgataccccggattaccgcctgcgggtgcgtattcaccgggaattcgcgccggaaaccgcggtgctggaggagtccggggacaaaaacagcaccctgcagggggtttatcagcaactggcggccctgcaccgttacctgctgggcattcagaacgcgccggtcccggggaaagccgccctgaatgccgttcagcagcggcttgaacagcataacgacgacccgattttcgacgtacagcagcgggcgaaaaccctgccggcaccgctcaaccgctgggtcggcgcactggcggaacaggcctggcgggtggtgatgcgggaagccatccgttcgctggaaatcgaatggcacgacaccgtcgtcagacagtaccagacctacctggccggccgctatccgtttaacccggacgcgacggaggaggtgccgctcagtgagttcgggcggttcttccggcccggcggcacgctggatgccttctatcagcagaacctgaaaccgtttgtggaaaacaacctgacccaccgcgcggacggccagcaacttatccgcccggatgtgctggaacagctgaaacgggccgaccgtatccgcgacaccttcttctcgccgcaaaacggtctgggggtccagtatgccattgagcccctcagcctgaccggcaataaacgccgcagcctgctcaatctcgacggccagctgctcgattacgcccacggccgcagcagcattgtgcacctcatctggcccaacgcgatgcgggccggggtggaaagccagctcacgctgataccggatgccggcggcaaatccccgcgcgccatccgcttcaccggcccgtgggcccagctgcgcctgattaacagcggcaaactgactaacgtacgtcaggattcgtttgatgtgcggttcacggtggacgggggcgacatgacctaccgtctctacgtggatgaatccgacaacccgtttgccggcggcctgttcagtcagttcagactgcctgacaccctgtattaagggcaaactgtattaagggcaaattttatgccttgcaacatagccacccactctgtccgccgcgccggcggcagaggaaaggatgaacagccatgcgtgaacgccctgaaaacctgattatccgtgccggcggcaacccgatgacgctgccggcgttcaccgccatacgcgaagaaattaacaaaatcaatcacccgtctcagccggcggtgaactggccgcttatcgaatccctggccctgacgctgtttcgctcccacggcgtcgatttgcagagcgcgatttactacaccctggcccggatgcagctcagcggcctggcggggtttaccgaaggctgtgaactgctggccggggtgatggtcagccagtgggatgacctgtggccgccgcagccggcggtccgcaccgacctgctggactggtttaacacccgctgcggccacgccttacgccagcacgattacaccgcccgcgacctgcggatgatttaccgggccgagcgggccttacagctgatagtcgaccggctccagcagtccgacctgaaacgcctgccgaaggtcgaaaacctgctgtggttcttccagaacaccgccaaaaaactggaacagacccgcatcctgcccaagcccgccgccaaacccgtgcagatgccgccgctggtttatctcgccagtactgaaccggcgccgtctgaaccggacaccggcgacgacgcgggatatgccccctctcagccaaaagtccaggtccgtttccctgaaccgccctgtctcttgatcagatctccaaatcaactgatttagccagcaaatagccgtctatcagggtttgcagccgaaaccagccttcccaaagtcgttcccatccgactcgacccgtgcgtttggaatcgtaccagccggccagttttcccagattgatgaaggcccaatgcaaactcggggcttttttcggcacacggcgtttttcttgttttgaccacagtaatttccacgccagggggcttaatactgtctcacagctctctttctctgcctcttctttgttcagacccataaaacgcagctggtgtattcgtaccgcaataaaggccagcagcactatcatgcgctccagattatctttgctttgcatacgcagcgcttctacctgcgtgccgcccgttttccacgctttgtgaaattcttctatcagccagcggcgctcgtaataactgaatattttatgggcgtcttcctgactgttgacgggttcggaggtcagaagatgccagcaaagcccatcctccggacctttttcgtagcaaccgacataaaatatccgcaccgcctcaccgctttttccttcggggattttcaacgtcacttcggcataactgatatcacaatgcgcgacacgcgcctgacgcccgcctttctgtctgacctgaactaatcgttctccagcactctgtaaccggctaataaagtcataaagtttatcctgactttcctctatacgccggttttgcatcgaacggatgacgaaacgttgtttttggctcgttttataacgcagatattcgatgatatcggcttcacggtcacagacagaaatcacgttggccatctgctcccctaaccggctgtcgacggcttgtgaggcccgttcccacttataactctctttcccttcataagggcgtgtatcgcgttgtcggcttttgccataatcactgacatctcgacaccagcgctgttgctctatcaaccccacgacctgttgttcttcaggcgcaaataacaacaccgagtgtgcctgcatgccccgggatttttcctttgaggtggtatagccgagttcatcggcgaccgacgcatgggaaaatgacagggttgtcgtgtcttccagcgctaacaggcaatgataacgttgagcgtgagcgacggtggcggtaaatccggcttcggcgatggcctgaggcgcaatggcggaatttcgggtcagtcggtaggccgcttcaacatcggcaggagagtcaagagattgcacgagcgattgtcctatatggttagccaacgaacaggccactttcaccaggcggttggtacggcgtttatcacctaattccgcatgttgaaacgtgtcatttgcccattgttcggcgctggttgaaaacataaagattacctcaagtcgtgttttttattgagatcaatctatgagggaaaagttcaataacgcgggggcgggttaaaatatttgtgtaggaaagacaggaaccgcccccgcggccgatgagtgccttacaggggttcggcctgggcctgttactgggtgcattcgtcctgaccgggacctggctgggattttaccggccgctgcaacagcaattcactgccctgactgacaccccggacggggccagactggcctggctgtcccacccagacctgacaacctatgcccggcagttaacccggttagcggacacctccccgctggtggtgctgcaacaggctgagcagctgaccgacagggcacaaaaaacctggccgcaggaccgccggcagcagcgggaaacgcagcgctggcagcagttacagtccatccggcgggaaaacgcgccggtctccggcagctggcagcagacccggcatcagctccagttactggcggacaatatcctgacccaggagcgcaaccggggcagtttcaccctctcttacctgaaaacggcgatttaccaaatccagcacagccacaaccgtgacgtcccgctggaagagctgctgcgccagctttccgtcgccgtcgaacagggtgagagcgtctcgccggcgctgataaaaaagaccgacgaccggtttaacgccctgctcagccagtattacgcgttgcagcaggccgccggcctgaccgcgctccctgagaaaaaccgcccgtaaattcagagaaggaacccttatatgtcatttcagaaaaaaaccgccaacgccggcaacctcgcacaacaaatcgctgaccggctgagtccgcaaagcgccggcgggttacagtttaccctcaccgccggcggcctgccgccgcacacctttgtggtggccggctttaccctgcacgaagccctctccaccccgttcacgctgaccgtcagtttagccagcgccgacccggcgattgatttcgccgccgtcctcgaccagagcgccaccctgaccatcctgcgcgccggcaaagtcgagcgcaccgtcaccggcatggtcgccagctttgtccagggcaataccggcaaacatcagacccgctatgacatgaccatccggcccgatatgtggcgcaccaccctgcgccagaatgcccggatttttcagcagcaggatatcaaaaccatcctcaccaccctgcttaaagagaacggcgtccgggatgtggcgttcagcctgcgcaatccgcacccggaacgggagttctgcgtccagtaccgcgaaaccgattttgactttctgcaacgcctcaccgccgaagaagggattttttacttctttgaattcaccggcaataaaaacaccctggtgtttgccgacgatgcgggctctgtcgtcaaaggcccggtgctgccctatcaccccgacgacgctgaacaggcccggcaactgtgcattacccggctgacccgccaggcgcaggtacggccggcggtggtcgagctcaaagattacaccttcaaaaacccggcctgggcggcggagttccgtcatcagatgcgggaacaggacctccagcataccggctatgaacatttcgattttcccggccgcttcaaagacgaacagcacggcgctgatttcacccgctaccggctggaagcgctgcgcaacaatgccctgaccggcgacggtgacagtaatgccgcgacgatgcagcccggcgtgctgttcaccctgaccggccatccccggcctgacctcaaccggtgctggcagctggtcggcgtcacccatcatggcagtcagccgcaggcgctggaacaggccgccggggagagcggcaccgtgatgcgcaacgactttaccttcattgctgataatcagcactggcgcccggccccgttacccaaaccggcgatggagggcccgcagattgccaaagtggtcggcccggccggcgaagaaatctactgcgacgcctacggccgcatccgcctgcaattcctctgggaccgctacggccggagcaacgacagcagctcctgctggatacgggtgacccagccctgggccggtcagggctggggcatgctggcaataccgcggattgggcaggaagtggtggtggactttcttaacggcgacccggaccagccgattgtcaccgggcgcacctaccatgccagcaatctcccgccaggagccctgcccggcagcaaaacccagatgaccttccgctccaaaacccataaaggggacggctacaacgaactgcgcttcgaggatgccaaaggcagtgaagcgctggctttacacgcccagcgggacatgaacaccgtggtactcaataaccgcgaaacccgggtcatgaacgaccacaccgaaagcatcggccataatcagatgctttcggtcagaaacgaccgccacaaagaggtgacaggcaatgaagtcagcgctatcaccggcctgcgtcaaatcacggtcgaaaaagacagcctgctgaacgtcaaaaataacatccagatacaggcccgggcggggggtatcgaaattgccacggccggcggcagcatcaccatcgacaatgccggcaatatcagcattcagggggccaatatcaccatcaatggcaaacaggtcaatgtgaactgaccgctatcgactatcagcttattattttaatcaacaacggaaaaagcatggaaaacacaacctatcagatgaatgaaggctcactggctatcccgggcaactggcgggatgaatccatgaatgtatttgtgctgccggacgacagcggcatcaatctggtggtcagccgcaccccggtccccgccggcatggataaccccgcttactatgaacagaccctggagcagttctgcacccatctgcccgggtaccaggagcatcagcgcagcgaaatcaccctcagccagcaacccgcccgccgtctggattaccagtggacaagcccggaaggcgacatgtaccagaccgtgatactgcaaatccggggcccgctgctgctgaccttcaacctgacctcccccgcgccttttgaagccggccagcgtgataccctgctggcaattgtccacagttttcaggcagcctgatgacctgacaggaggaacaccatgtcacttggtgatgaaatcgtcacccggatagcgcgggttggcgcccggcacgcggtgcacgtctccccgccacagggctcccccggtccggccgccgcccgtgagggcgacccgattaaacatgccagcttcctgggggcgctggcgggtgccattaccggcgcactgataggggcggcggtctttgccgcggcatcggcactggtgggactgaccattctcaccgggggattagccaccgtcgcggtcattgcgctgggaaccgccgccacatttgccctgggcgatgtcatcagcgccgccagttcggccgtcacgaacatggtggacagcatcggcccgccgagcggcaccctgacgagtggctcccccaatgtctttatcgaaggccaaccggcggccagagccaccaccgatatcgccgtttgcagtaaacacccggcgccgcccctgattgcccagggcagtgaaaccgtgttgattaacggctcgccggcggcccgggtggatgacaaactggcgtgtggcgccaccataaaatccggggccaaaacggtgtttatcggctccggtcagggaacttacctggcagtcgccgacgagttttccgcctgggaacgggcgatactgatagcggttgaatttctggtgccgccgtcacgaggcgcccttaaggggctgggtaagctgtttaccaaacccggtcagggaattcagggggtattgaaaggcgcgaaggcgggtgctaaaaaggctaaggcgctcctctcaaatcgaatttcctgtgccaaaaaagctttcagagaaactgaaggggcaaaacgttaccgggaagcgacgaaaaaattctttaccggcgacccgattgacgtcaccaccggccagttgtttgaccagcggaccgacatcaccctcggccagaccctgccgctggtgtttctgcgcagctgggtgccggaggaacagggcttactggggccgggctggacggacagcttctccgaatgcgcccttgccaccggcgaccgggtagaaatccgcaccaccgaaggggcttctctctattttgccttaccggccgcttatacccacagtgttaacccggaccacccggactttaccctgagccggggagaacagggatatattctccgtcaccgtgattcaccggtcagcaaatattttaccctgccccatccgtcatccgcctcaaaagaggcaccccggcgctggttgctgacggaacaccgggacgtgtatgacaaccggctgcggtttatctataacaagcactgtcaactgacacaggttctccacagtgacgggccggagttgacgctgctttataacctgcgcggacaactgacagagatacgccgcaccgatgaaaggttacaggaagtgatggcccgttatcactaccatgacaacggccggctggcggaagcggacagtactcagaacttccacctgtactatgaatataacgcgcagggcctgataagccgctggtccgatggcgaccagacctgggtggattaccgttatgataaacaggggcgctgtactgacagtgtgggagccggcggcttctatccggtccatctggattatgcccccggcataacccgctccaccaccccacaggggcacaccaccaccgggcattacaacgaccagcagttaatcactgaaatccacaccccgtgcggcggcgtgacccgttatgaatacgaccgctggggcaatctggtcagacagatattaccggaaggggaaaccctgacgctgacttatctggccgataccggccgggtcacttcgctgacggaggcgaccggcgcggtatggcaatacagctatgaggctgacagcctgcaactgaccggcatgaccgacccgctgcaacgcacctggctgccccagtatgatgaacagggccagccggccggatttattgcgccggacggccggaaaaccacgctgacccgcaatgctttcgggctggtgacatccgaaacagacccggacggcaacagccgcacacaggaatatgataagcatcagcggctggtgcgggtgctggatgaagagaaccggaccgtcagtctgggttatgacagccaggaccggctgcgcagcctgaccgcggcaggggcgctgtggcgctggcgttacgaccgtcatcaccgggtggcggtcagcgaccggccggacaaccagctggaacacttcacccatgaccgccacgggaacttaacctgctggaccgatgcccgcggtgtgaaatggcaggtcgagtatggcccgtttgacctgccggtcgcccggcgtgacggcgaggggcatcgctggcagtatcgttatgatgccgacacgctgcaactgacgcaggtgattaacccgcagggggaaacctacagctacaccctggatgccgacgggcgggttatcaccgagcaggattatgccggcacgcagtggcattatcgctatgaccggtcggggaactgcattgaaaagcgggacggggaagagaacgtgacccgctatgactatgatgctgcccgccggctgacgacgctgcacaccccggaaggccccacccgttatcattacgacagcgtgggccggctgttaaccgtggactccccggacagcaccctgcattttgaatatgacgggcaggaccggatagtgcgggaaattcagccgcacggagaaattcagcgtcactacccggataaccgcaccgcagaacggcagttgctgaccggcgaaacagcgccggtcaccggcccggcccggtttagcggtcagacccaccccggccgctggcagagccggcgggaagttaaccgggtgggagaactgattacgctgacgctggcagggcaggcacccctgaccatcgaacgggatgacgccggccgggatacgggacgttatgtggacgggggatttattctgcgccagcagtacagcctgatgggccagttaaccgcgcaacgggccggccgcaatccctattttttccggccggctgaaccggacgagattgagggacccgcttacgcgggcgtggcccgccggtatgaatacgataccgcgctgaatctgaccgccgccagtgatgacgggcagcaggtcaattatctcctcaacggcaacggccaggtgatttcggtgggggagggccggacactgcgcgagcattatcagtatgatgaaacggggtacccgtcaagacggtttgacggggtgcaggagattatgggggaaaccctctatcaggagggccatcgcctgaactgggtgggctcgcaccggtttgtttacgaccgggccggccgcatgcaggagaaacagtttttagcggaagggtgccggctggcgctgacgaaataccggtggaacagccagaatcagctgaccgggcttatcaccccggacgggataccgtgggaatatcgctatgacgccttcggacggcggacagaaaaacggtgtatccagagcggtaagctgaccacctatctgtgggatgggaatgtgccggcggaaatccgcgaatatcagcacggccggctgaaaatgatccgccatctggtgtttgacggctgggaactggtggcgcagcagacgcaggcgtttacgcttaatctggataaccgggtggagctgatggccggggaggtgcagacccagtatgcggtcagcgccccgaccggcgagccgctggcgctgttcgacccggcaggcaaacgggtgtggcgacgaccgaagcagtccctgtacgggctgcggctgggcggatacggcgaaaacccgcagctggacccgggcctgagatttgcggggcaactttttgatgaagaaagtggtttattttataaccgatttcgctattatttgccggaagcgacgtgctacctcagccctgatccaactggcctctggggtggtgagaatacctatcgctatgtgcaaaatcccacgaaatttattgaccctctagggcttgctggtgaaaatgtatttattcactatacaaataaagcgggttttgacggcattatgaagagcggtgttcttcatccaaacgtcagtggaaaagtttatataacggatgtactaatgtctccaaaagatgtaatgagagatttattgataaacaaccccaatcatataggacgaggagactatgcgattattttcaaaatagatccaggggaaagaggaaatatccgctcaccttctagattagaatatactcatgaaggaaagttgaaattgaataatattctgtatgccggtaaaaacccatatgccatattagaacatcttgattatgatacgagactcaaactcactgataatcaagttaaaatcagaaagtgcggaggaaaataatgaagcacgaatctattcaattagcaagggaagaggtgaatgcaataatcaagctgatcctttacataaagtttgaatgtgaagatcctggaacattgatatattcaagtagtcctttgataaattcagcattggaaaaaatgttgaatatgtatggttataaggatgattgggataaagttttttcaaaatttctagaagcagataagaattttgtaatcaaaagagtcgaatatttagaaaaacatgaaaatagtcctcttgatgagggaattaagcagcaaatcttatcaaatcatgcatatccatataagtggtagttaataattaacaaagccggaaagatccccgtgatctttcggctttgttatttttatgcttaaaataaatatcttacagggttggacttatatattaaatatatagcttaaaatcgcaaaaatataaaataaataataagataaacaaagggataatacagaaaaatataatattaacgataaatatatacataagatatatttttgctattttattctgttttttctctgaaacaacaaaaagccggaatcacttccggctggcttctttcttaccgtgggtgaatacccatgccacgccaacgccgtgtggttagtgcaatggcaaggcatcaaggtaatcatgatgtaataagaaatgctctggataaaataaatttaaatcaatcaactgataccatatcgaaaaagtgactcacatacaaaatatagctaaaaaaatatggataatggcaatattattaaatccaaagagatgtatacactgatattcaggggaaatacgtaaattaaacaggcagacaaagcgtctttgatctctggagtaaaactgtaggataattcaatatgggtgagacaataagttttcatatggaaccggttgaattttttaaaagttcgtattttttatccggttctattggagaatttaatgaatatgaaattattgataataaagatatggcattaaagcttcttttcgatcaagacataccatgtaactatatggtttggagtgattttttttctgatctggtatccgagttttatcttcatgaggattataaaaaagcagaaaaggatatccttgacagaataaaaatatctacccaggatcaagttaaagaaaacattagaaaaagaaaactatatcttacaagaaagaaacaagggttagttgataacatagaatacgataactttctaaatgaagtaaatgacgaatgtaattacatgttaaatatgataagcatttatcgatatttattttcttttaatcaagactctaaattagaagaaatattttctatatttaaaaaaggagttatgccgtgcggtataaaaaaagataaaaagacattagttattttcaatcctattcttttgaagaatagttaataaaattatagatgaactgccctcaaaagctagattcaacatttaatgactagatttagagaagcagttcacaatcactagatcttccgatgttcttattgatttaccgtggcgcataccctcggtaagccagagcagattgaagcttaccgagggcatccttaatctgatacgcctcctcgtcattcacggcacaggcgcgtatctccgcccagttcagccgcttgaccagttgggccaaagccagcgcttcaaggtgagttaactgaatgtcctgcaaatgttcaatggctattgtcatctcatgctctccccttaaccagcaaaaccacttatcagcgcccgctacattattacattcaacttctaggatgcctcatgctcaaatcagcgcagcacaaaagataaaaagagagatatatgaggaaagaggaatttcatacaagttatagggagatgattgatgctggcgtacctaaagctcaagcaagaaaagcccttggcgatgcttataaatattttgataagcttagaggcgctaataaaaacaatccattctttgatatctagatttattaagaggaaaatttcatgaagaaagaagatattttagagaaattaaattctattgaaaaagaattgaatattaaattacctaatttttatagaaagtttttatccgagaaaattcaaaatgaaccttatattgaaataaccggaaaagatcaagaaaatatatatgtttataattgtgaatatgttattaaaagaaataaaacatataacattcaagaggctaaaccaaattattttttaatcggtcaagatggtgatcttggttactttatatatgtagaaaaagataaggaaagtgatattatttatagcctagacttgggggctttaggtagcgtagaaatggataaggaagcggataaagaagcaaatgatatttatagtttaggaatataaatatctaaaagtcagccaagataatgagttagggctatcttggctgaataaataacgtttcataattctgctacacatgaccttcttcaacccattgttatacatagaattatgagtagtataagatgtagcgctatttgggaatcttatttatataaatcgaattttaatcgataaaaattctggcaggaaagcaggattaaaagctggcgataaaattagtgaaataatattcatttgaggatgatttcaatgaacgattcttttttttcacaacggatacagcaactttagctatatttgatttacaagcaataaaacacagaataacagatactcctgattggtggagtattccagacgatgaattaaaagaagtaaatgaaggcaatattgctttttttggcttaagagatgatggcgattatgtaattgaaattattgataatattgaacagccagatattagtttgaacataaagtcaccatcgggaaaaatattcattggtgccggggaagataccacaggaggagatttagaacctgatgattcagaatatatttcaggaaagaagatatctttagaaaaaggaaattatctgatcttattaaagaaaaatgaaaacaacatacagatatcatttataaaaagtcagtatttttcaaataaccttcaggagcctattagattaggttaattcaagtagggcagaagatcttacagatcttctgccctgattaatgatctaccgtggcgcatacccacagtatgccagtgccgactggagcttatcgatagtatatttataagagaatgaatccaatggtttaattccgtctcaaaaaaatccagtttattgtcaaggttatatttcttagaaaatgaaattttctttatccatgagcaggacaatatgattggaatgattcttaatgatgcttttcatccacatgaagaaaatatgattttaaaaaaataatcagatggatatgaaaaataaaatatggtctggtcaagtatctacaaccaaatgtgggagagtaaattaatgaattattatgtattaatgaacgattataattcttcactaatgccaagatatcttcatgctatagtagataccgagaatcaaattaatgaaaaatgggattatgaaggctccaggcatgatataccttattatctattagataaggaatgccctaatactttatatttgttatgtaataaaaatattgggaaattgtggtttaattattatcaacacaatatggctcatatcctatctgatagatttttcgatattatcaatgagtttaaattaagtgatcatgttttaaaaaaattaattgcgacatctattaaagatggaaaaactatcaataactcattaaattatcttttttttactgacaaagagttatttctaaatgaaaaatattcaatattggaaaaagataaatatggaaatttaattcctcataaattatcttttcataatgaatcattaaattatgatattttttcaatacggactactttattagcaggatttatttttatttcagaaaaagtagctaacagattaattaaagaaaatatcaaaagaataaagctaattaaattagatgaagtcttgaatcactattgtgtagattttaagtacgacattaaagctaatgtcaaaaaagggaaaataaaattaccctaagctaatagtaaaaagccggaaagatccccgtgatcttccggctttgttatttccatgcttaaaataaatatttttcacggttggacttatatattaaatatataatttaaaattaaaaaaatataaaataaataataatataaaaaacaataatacataaaaatataatattaatagtaaatatatacccaagaaacttcaagatgcagtttttagcacctgaaaatggtcgttaattctagacatcagcgagtccgctatatccggtagcgttgtggtgaaaaatttgaagacgttgtctcgaaattcatgtttatccgcaaaataacggttatttcgaacctgttcattcatgaccttccataatcgctctattgggtttaaatttgggctatagggaggaaggtaatgtaactcaatattgctaacataagcccactccttaacaagatgagctttgttgtaacccgccccatccacaataagatgaattttttgatgatagtcaggataagactttcttatttcattgaaaaaacagcaaatgttgtagtcattgatggtttgatattcctggaacaccgtacgaccaatggcattcaggttgagcgcgcccaatatattcaggcgagtccggcttcctgttgtttttactgtttttttctcgccttttcgcatccagccataaccgagtttggtgccttgagtcgggtgaacagcatcaagaaaaaggatgggttcgtctttcgctgtgactttaagattctcataatattcaataaattgtcgctgtttttctgcgtcgaatttatgagggacgccacaaggttttttataagaaaaaccctgacggtgtagccatttattcatgccgggaatgctaaaggtaatattccagagctgagcaacataggccacgatttcatgggtgtgatggaaaagatgttgagataagtgattgattaaaaaatcagtttgttcttgagaaagcaaactatcagaccccccattatcagatttaagtttaccttgattaaggtaatcgctgatatgacggttaacggtcatttcatgaagacgcagggcctgagcgatcatcactgaactccagccttcagaggccagcaggaccgctttgatgcgatcacactccctcttatcacggcaggtgtgatggagatgttcaagttcggctttttgttcatcggtaatgaatattttcatagcgaggataatgatctccatttcggataaaatcaagcatcttcaatgattacgggtatatacatatgctatattttagctattttattctgttttctctctgaaacagtaaaaagccggaatcgcttccggctggcttctttcttaccgtggagaatacccatgccacgccgacgggttagtgtaatagcaaggcatcaaggtaatcatcacggatatactgatgcaatactctggataaaataaatctacatcaatcaattaatactatatcgaaacaagtagctaacattcaaaatataactaaaaaagatatggagaatggcaatattattaaaaacaaagataggtataacactaatattcagggggaagacgtaaattaaaaagtcagacaaagcatctttgatctctggagtagaattttaggataatttaatctgggtgagataataaatttttatatggaacccgttgaattctttaaaagctcggattttttatccggttctattgaagaatttaatgaatatgaaattatggataataaagatagggcattaaagcttcttttcgatcaagacataccaagtaactatatggtttagagtgattttttctctaatttggcatccgagttttatcttcatgaggattataaaaaagcagaaaaggatatccttcacagaataaaaatatctacccaggatcaagtcaaagaaaatatgagaaaaagaaaatgatatcttataagaaagaaaaaaaggttagttgataacatagaatacgataactttctaaatgaagtaaatgacgaatgtaataacaggttaaatatgacaaacatttatcgatatttattttaatcaagacgctaaattagaagaaatattttctatatttaaaaaaggagttatgccgtgcggtataaaaaaagataaaaagacatgagttattttcaatcctattcttttgaagaatagttaataaaattatagatgaacggccctcaaaagctagattcaacatttaataactaaataagattctaaaatagtgctacatattataccactcataattccatatataacaataggttgaataaggccatgtgtagcaaaattatgaaacgctatttagatttagagaggcagttcacaatcaccaaatcttccgatgttcttattgatctaccgtggcgcatacccacagtaagtcagtgcggattgaagcttagagtttaccaaggaaatgatttatttgatctcaatcatattgatgacttcggaaggacgaatattcaacgaatgaagaaagggattacacctattggtaaggatggcttagaaataaaccttcatcatgtcattcaaaatgaacctggcccaatgactgaaattttaagtagtacccatagtaaatacaaccatatgcttcatatgtattcaaatcaatgggataaaacataggtcggtcctgatggcataagacgcacatataataatgcgccaccatcaacgaataggcacccatttaaccagtggaagaaaacatattggaaaacaagagcattggactttttaactccttaagaggaaggaagctatgaattatatagatttaattgaaaaggaaatgatatcaagcggggaagaaattctttctagtggcggggttgatatagatactatccgtgaattcgaatcattgcttggtgttacttttcctgaatcatataaatttttcttacaaaaatatggaacactttctttcggcggagatgattactatggaataactaaaaagggaataaatggaaatcaagccccatgtattctgtatgtaacaaagcaggccagagattccggtgatatagatgaagggatgattaaaataaaatcatcgggatatggtccttcctattctattgataccaatattaaaggaaaaacaggagaagctgtagtagttgagactgaattatccttcaaaagagacggagctaaaaacataattgcagatagttatgctgagtttctcttagaagaaataaaacaagctatagaagacttataaaagctactttatattaataatgataagccagagaaatctggcttgcccattttaaaattaaacgtctcatcccgcccaataaattcccaataaattcccaataaattcccacatccgcagcttgatctctctgagctggaagtcaaatttaaatgcattgaaaagataaccatatgaaaaattatgagaaaataatagaatctatttttagtgaattatttgatgacaacttaccccgttatcagaatagtttaacccgtccaatagataataatgatgatgtgtatgctaacgccagaaaagcattatcaaaattagatgatcaagacaaaacagctatttttgacttcttcaaggtagtaatacctgatacatcatcaactatatttggaaccattgatggttctcattttccccccaatatagatggtgattttacgttaatttatggagacgaagaaatacaaggaagtttacaagatttattcatagaaaaagctgagaataaaggtatttttaattaaaaaagtaaggctgaaagatcctctgcaatcttccagccttattatgatcgtaatgctccagtgaactcatacttcaattaattttcatttaaatctaagctctcagctttatcataaatacttaatacatctttccattttatcctgaactgatttctttttttcactttagacaatccttcctggtattttatattaacacctggatcatagtatattttacttgattcaagtgcatttataaatttattaagattagcacctgtagctaatacaatttggggaccaaacttatagtatgggaaatcaccatttttcacatcatacgagacaaaacatgttttagaatgtttccgtttccagtggtctaataattttccgaaattccagccagcagcaatattaccatttatactcctaagtactaatccgccatcaggatctataatttttttcttatcaaaatcatatccttcgagatataaagtcagcttcgttttttcgtttaacaatccgattttatgtatactggcaaaatcgactctatcctcttttttactggatgcataatcactcataaatttatgtaaattttctatgtattctcctttatttggctctggtgtcattaaagttacaacgcttcctgaatgtgcttttaattcccaaccagaaaaatcaggtccagatctgccatttggtataattccaaataaactttccagggtaaaacctgccccatttcttgctctatattcaattacattaccatttttatccagtctttgcgatttaataaaaccataagaataaatttccttcaaacgagttataagatcactacggctgtctttaatattagagtaatattcataaaaaacagagaaaacaggattcattaaatttttatctattaattctctgagctcaatggaaagagcgtcttcccaagaactcatataagcaaaaaccatgtctttacatataccaagaattaaataacgattcttatcacatctatttattctttcctctttcgttggcggttgcattaaatgagatggtgctattgaacaaccatttataattcccgacaggcgaatttctggatagttaggatacaaaataatttgagaaccatgtgcctgttctttacaactgtcagtatttatccaaaataaatttaatgtggccttaaatctcgcacctttttttgacataccagcgcttttcagttcatcaacaggaataccctgtatgacagaaaaatccgctcccaaatatatctgttgtttagaattgtcattgtttgcaagtggcttaactataatttttttagctcccaaatccttcatgataactgatattttatctatatttatcagtttattagtcatcttctgccccgtccattagttataatctctctatagattaactctattaaagtaaaaatagaatgccacactgaaggatagattatttttcaaacaaaataaaacttataggtggaagcgatttggtatgtaatgtaactgtttcttacagaaaaagagtcaaaaaacacttttaattcaaataactactcatttttctataaaagtattttatgtatccccactgtatcaatttccgcatgagtttcactggcacatagccattcttcaattctttctgacaactcattatctgtcagtttcaaacgtcctctcaaagtacattcccaaataactaatatcttccagctattatccgaaagagaactcataacaaattgatctcttctgatatttttctcaattttatctaaccagaattcagttcgggttgccggagttttgaatagatgacaattatgcccatgccagaaacatccatgaacaaacaaaacagcctgatattcatcaataacgaaatcaggcttacccggaagctcccttacctgcactctataagttaccccaaggtcatgaagaattttaacgagctttttttctatggctgtatcacagttacgaattgctctcatatttttactgcgggtggatggattgtgaacatcagccataaattatctatgccgcctgatctttgtttatctgctgttgtttcactgctttcgctatataaggagctaataatttagcaacagctgtaaatacaggcacaacaactgagtttccaaactgtcgataagcttgtgtatctgaaactggaatatgaaatgcttctccctgaggagactcaaaccccattagccgtgcgcattctttcggtgttaaacgacgcgggcgattttcctggttatctggattatcaaaatcctgttccccaagctttttattccatccccggtcaataaggatttctgagccatctttatggtaacgcgcagaaagtgtgcgagtaacactatccttattgttgggatctataaggccaaatccaaagccatttcctttagcctgatgttttctggcataattatataaatatttccagagattaggggtaagaatatatttactgtcaacttctggttcaagtaaatccgcaagtgttggccgttctttcgggaaatatcgactaatatccctaagtgtaaatccttgatgaatattcagatctttccgaaaaccaactaacacaattcgttccctatgctgaggcaaaaaatattttccatcaataattttaggatcattcggccccatgatatcagcatcagcaacagcgtatcccagctcattcaatgtattcatgataatacggaatgttttccctttatcatgactttttaagttcttaacgttttccagaagaaaaatagcaggttttttagctgtaataattctggccacatcaaaaaaaagagttccctgtgtatcacactcaaacccatgagcacgaccaagggagttctttttcgaaacacctgctaatgaaaatggctgacatggaaagcctgccaaaagaacatcatgatctggaatttctttatcaatatttttataagcttctttttcatctatttttgagttttcacttaatgttatttcacgaatatcagaattaaatttatgggattccggatcacaataccagtttgctttgtaggtacgaacagcatctttgttccattcgctggtaaaaacacactgaccgccaatttcttcaaaaccttttcgaattcctccaatccctgcaaaaagatcaatgaaacggaaaccgtattgaggatgatttttgggtggttcaggtagcattttttggagcatagcaacttcaacttctgttaacaacttctggactgattttccgtgaaaccagcgatttaaagtttcacgggtccagtcgttataatttactctgcgcaaaagttctgcaatagttttttgatcataagactcaaaaagttgtcccatcagctttttatctgatgccaacttttgctgctgcaataacttcgatttttcatggagatcctgggcatacgaaaaaaattctttcattttatttatccgaaaaatgttttatttagtgatattatatcactcgattgacccagaataaagaaatttatggatatttatacagttatttactttacacagtgactcatctaaccacagcaccgatggcgaatggcaccggcaaaacaccgctggcgccgacgtcggcagaccgcaccgccgattatctggcgaaactcccggcggcggataacgccctgctgcaacagatagaacagagtctgaccctggccccttactggctggacggacacgctatcgcggcacaggccgccggcaaactgggttaccacgccgtggctgacgctatccgcgatgaactccgggcctttcttgaccgtctgccggtcctgcaaaacctgtctttctccgatatgagcccgtttatctccgacgccacgctgaactggctgcatcccccggcgaccgccaccgtcagcagcggcaccacgccggaacaggacgctgtctggcactgttttcagcaacacggactggaagccgccctccacgccgcggagcaatatcagcaacacctgaccgaaccgcgggatcaattctacggtcagttactgacggcccagttactggagcaggcgggcatgcacgcactggcacaacaacattaccgccagctgcgccaggcaggacaacacctgtcactcgccgactgggaacccggcctgctggcggccctggcagaaaaagccccgatgaccgcccccgccaagacgacgaccgcaaacaggagcgttaacccatgaactggctttctctgctgctcaacaatatcaaaaaaccggcgaggccgcgtctgccgcccctgaaagccaccgcctcgctgatactggccctcctgccctgtctggccctcatctggctctggtggtggggacccggctggcagtttaagcagacgcatccgctggacaccctgtctgcccgctggctggcgacggtgatcatcctcctgctggccctgagcgttgtcgggataaaaatctggcgccgcctgcgccagcttgaaaaacttaagctggagggggaactgaacaccgtcgatccggtgcgcgccgatatcacccgtcaggaccgttatctccatcactggaaagcgcaactgcaacgccatctggggacccgggattatctctaccagcgcccctggtacctggtgatgggtaacaccggcagcggcaaaaccgccctgattcaggccggctgccggctgactgacattgccgccccggacaccctgagcggggaagaggcgctgcccctgcatctgcgctgctggctaggggagaaagccgtcatcattgacccggacgggttccttatcgaccagatatcgccgccggacaccggcaaaccccagctgcccgcccgcctgtggcaggcgctgctcgtctggctcaccgaaaaccgtcagcgccagccgctcaacggcatcatcctgacggtggacattcaccgcttactgaccgacaacaaagcgcagcgggaacgggttattgccgcgcttcacctgcgcctgcaggatctgcgattaactctgcatcatcctctgcctttctatctggtgctgaccaaactcgaccggctgcacggtttcagcgccgctttccagtcactggacagcgcgcagcgcgcccagatcctgggcgtcacctttagcctgaatgcgcgggatgagcagagctggcgcactgagctggcccagttctggtgccagtggatgcagcagctcaacgcggccatgccggacatgatgctcaacaaagtcgatatcagtcagcgcagtccgctgttcagcttcacccgccagatacaggggctgcacagctatctggtgccgctgctggaggggctcctcgacaacggcggcccggcacagcccggcctgcggggggtttatctcacctcgtctcaacaaatcggccggatagatgacctgtttacccagtctgccgccgtgcagtatcacctggggccgcaggcttttcccacctggccggtggcggacaccgtgccctacttcacccacgcgctgtttgaagcggtcctgctggccgaaccgaatctggcggctgaaaaccgccggtggttaagccgccaccgccacacactgctgaccttctccacagcaggtgccggggtggtgctggccctgtggagcggctggcactattactatcagcagaactaccgggccggtgacgaggtcctggcgcaggccaacatcttcctgtcggtgccgccgcccaccggcgaagaccgtctcggcaatttacagcttcccctgctcaatccgctgcgtgaggccacgctggcctacggggattaccatcagaaagggctgctggcggatatggggctctatcagggcgcagcggtcggcccgtatgtggaaaacacctacctgcaactgctgtctcagcgcttcctgccggccttaatgaacggcctgctggatgacctgaaccgggcaccgaaaggcagcgaagaaaaactggccgtcctgcgtatcatgcggatgctggaagacggcagcggccgccataaatcgctggtcgaacattatatgcaggcgcgctggagtcaggcgtttaacggccagcgcccgttgcaggcgcagttactgacgcatctggactatgcgctggatcacaccgactggcgggccgcacgggaggcgggcgatcaggccgctatcagccgctttgcaccttaccaactgccgctcatcaatgccgagaaagaactgagtcagctctcgatttatcagcgggtctaccagaacctgcgcattaaagcccaggattcactgccgccgcccctcaacctgcgcgaccagattggcccgggctttgaccgcctctttatggccaataatgacaagcaactgattatcccgcagttcctgacgataaacggcctcaacaactacttcgtcaaacaggacgaccagctgatcgacctcaccgtcatggacagctgggtgctgaacctgtcacacaacgtgcagtacagcgacacggaccggcaggaaatccagcgacaaatcactgaacagtacctgggagactacacggccacctggcgcgcggccatgaacaacctggatattcgtgatttcaccgatatcccgcaggccctcagcgcccttgaacaggtcatcagcggcgaacagcccatcagccgggccctgcaaatcctgagcgacaacacccgtctgccggagattaacgagacgctgccggccaaagcccggcagccgttacgtgataccccggattaccgcctgcgggtgcgtattcaccgggaattcgcgccggaaaccgcggtgctggaggagtccggggacaaaaacagcaccctgcagggggtttatcagcaactggcggccctgcaccgttacctgctgggcattcagaacgcgccggtcccggggaaagccgccctgaatgccgttcagcagcggcttgaacagcataacgacgacccgattttcgacgtacagcagcgggcgaaaaccctgccggcaccgctcaaccgctgggtcggcgcactggcggaacaggcctggcgggtggtgatgcgggaagccatccgttcgctggaaatcgaatggcacgacaccgtcgtcagacagtaccagacctacctggccggccgctatccgtttaacccggacgcgacggaggaggtgccgctcagtgagttcgggcggttcttccggcccggcggcacgctggatgccttctatcagcagaacctgaaaccgtttgtggaaaacaacctgacccaccgcgcggacggccagcaacttatccgcccggatgtgctggaacagctgaaacgggccgaccgtatccgcgacaccttcttctcgccgcaaaacggtctgggggtccagtatgccattgagcccctcagcctgaccggcaataaacgccgcagcctgctcaatctcgacggccagctgctcgattacgcccacggccgcagcagcattgtgcacctcatctggcccaacgcgatgcgggccggggtggaaagccagctcacactgataccggatgccggcggcaaatcgccgcgcgccatccgcttcaccggcccgtgggcccagctgcgcctgattaacagcggcaaactgactaacgtacgtcaggattcgtttgatgtgcggttcacggtggacgggggcgacatgacctaccgtctctacgtggatgaatccgacaacccgtttgccggcggcctgttcagtcagttcagactgcctgacaccctgtattaagggcaaactgtattaatagcaaattttattcattgcaacatagcaacccaccctgtcctccgcgccggcggaggcaggttaaaggatgaacggccatgcgtgaaccccctgaaaacctgattatccgcgccggcggcaacccgatgacgctgccggcattcacggccatacgcgaagaaattaacaaaatcaaccacccgtctcagccggcggtgaactggccgctcattgaatccctggccctgacgctgtttcgctcccacggcgtcgatttgcagagcgcgatttactacaccctggcccggatgcagctcagcggcctggcggggtttaccgaaggctgtgaactgctggccggggtgatggtcagccagtgggatgacctgtggccgccgcagccggcggtccgcaccgacctgctggactggtttaacacccgctgcggccacgccttacgccagcacgattacaccgcccgcgacctgcggatgatttaccgggccgagcgggccttacagctgatagtcgaccggctccagcagtccgacctgaaacgcctgccgaaggtcgacaacctgctgtggttcttccagaacaccgccaaaaaactggaacagacccgcatcctgcccaaacccgccgccaaacccgtgcagatgccgccgctggtttacctcgccggcaccgaaccggcaccgtctgaaccggacaccggcgacgacgcgggatatgccccctctcagccgaaagtccaggtccgtttccctgaaccgcccccgcggccgatgagtgccttacaggggttcggcctgggcctgttactgggtgcattcgtcctgaccgggacctggctgggattttaccggcctctgcaacagcaattcactgccctgactgacacctgtctttcctacacaaatattttaacccgcccccgcgttattgaacttttccctcatagattgatctcaataaaaaacacgacttgaggtaatctttatgttttcaaccagcgccgaacaatgggcaaatgacacgtttcaacatgcggaattaggtgataaacgccgtaccaaccgcctggtgaaagtggcctgttcgttggctaaccatataggacaatcgctcgtgcaatctcttgactctcctgccgatgttgaagcggcctaccgactgacccgaaattccgccattgcgcctcaggccatcgccgaagccggatttaccgccaccgtcgctcacgctcaacgttatcattgcctgttagcgctggaagacacgacaaccctgtcattttcccatgcgtcggtcgccgatgaactcggctataccacctcaaaggaaaaatcccggggcatgcaggcacactcggtgttgttatttgcgcctgaagaacaacaggtcgtggggttgatagagcaacagcgctggtgtcgagatgtcagtgattatggcaaaagccgacaacgcgatacacgcccttatgaagggaaagagagttataagtgggaacgggcctcacaagccgtcgacagccggttaggggagcagatggccaacgtgatttctgtctgtgaccgtgaagccgatatcatcgaatatctgcgttataaaacgagccaaaaacaacgtttcgtcatccgttcgatgcaaaaccggcgtatagaggaaagtcaggataaactttatgactttattagccggttacagagtgctggagaacgattagttcaggtcagacagaaaggcgggcgtcaggcgcgtgtcgcgcattgtgatatcagttatgccgaagtgacgttgaaaatccccgaaggaaaaagcggtgaggcggtgcggatattttatgtcggttgctacgaaaaaggtccggaggatgggctttgctggcatcttctgacctccgaacccgtcaacagtcaggaagacgcccataaaatattcagttattacgagcgccgctggctgatagaagaatttcacaaagcgtggaaaacgggcggcacgcaggtagaagcgctgcgtatgcaaagcaaagataatctggagcgcatgatagtgctgctggcctttattgcggtacgaatacaccagctgcgttttatgggtctgaacaaagaagaggcagagaaagagagctgtgagacagtattaagccccctggcgtggaaattactgtggtcaaaacaagaaaaacgccgtgtgccgaaaaaagccccgagtttgcattgggccttcatcaatctgggaaaactggccggctggtacgattccaaacgcacgggtcgagtcggatgggaacgactttgggaaggctggtttcggctgcaaaccctgatagacggctatttgctggctaaatcagttgatttggagatctgatcaagagacagcgcgagcgggggctccccgctgaaccccgtcgataagcgggcttcgccagcccgcacccggccaacccgcgtcagcggcgcagacaagctgccccgccgccccgggttatcgacaaaacccggttctggcagaaaaagcggggcgaaacccggcactgacatcggggaaaaagtgagctaaaatcggcaaaatgcccgtcggggcgagttgatatgttctttaacagggcgggaaaaagcggtgaagaaaaaggctgctaaatcagggggaaaggtccgctcaactgtatgatggcgtcggaatagtgcctaagatcctttaaatcttagtggtggcgttaacccgtacagctatgtccatgatccggtcaattggattgaccctctgggattggcagggtgccctcttattaatcgcatcgttaatgatgcgaataaagttgcgtcaccgggagggcatataacgtctaagcaagcagaaatattgaaaagtaacttacctgttgttcaaaggcgtagtgctcttcaaaatcaggtatctcgaaaagagtttgtgagagatcaagattatctaatgaagcaatgggagactaatacaggtaggacatggccgattggtgcaactccgcatcatataattccgttggaaagtggcggagcaaataagtggtggaatttaatgcctactcatggaacattacctaatcactcactacctggaatacctggcccacatgctgcgggaggggtccttcgcactacaatccaacaaggaagaaaagctcttcctccgggaaccataactgatttgagattgtaatatgattgatattaacgaagaattaggacaaattaaaaagacgagttttttctctaatatgggtttatctgatcttcaggatgaagatgtaattttgattgagagtgttgaaaaggtatttattaatccttcggatattgaatttaaaggttattataaaaatactaaatggcttccaacatcaccaactcaagaagatccattttataagaagcaagatagcccgaaagatcttgtagaaatcagagtgaagataaataaagcggtcatgagtatgactaaagagttggctaaaggtaaatttatatctggaccacatgattttaaccaagtagcaagaaatgctatatgctatgcatttagacaatatatatctgaaaaatatcttaatcttggtaataaatgggaaagaatagtaaaaatatattatgcaggacattggcctgttggaatttctaaagaaaaaataatagtaatttgatataaaagccggaagattttcagagatcttccggccttattatgatctattttggtgcatgccaacggtaagccagcgccgattggagcttatcgatggtatatttataagagaatgaatccaatggtttaattccatctcaaaaaaacccagtttattgtcaaggttatatttcttagaaaatgaaattttctttatccatgagcaggacaatatgattggaatgattcttaatgatgcttttcatccacatgaagaaaatatgattttaaaaaaaataatcagatggatatgaaaaataaaatatggtctggtcaagtatctacaacaaaatgtgggagagtaaattaatgaattattatgtattaatgaacgattataattcttcactaatgccaagatatcttcatgctatagtagataccgagaatcaaattaatgaaaaatgggattatgaaggctccaggcatgatataccttattatctattagataaggaatgccctaatactttatatttgttatgtaataaaaatattgggaaattgtggtttaattattatcaacacaatatggctcatatcctatctgatagatttttcgatattatcaatgagtttaaattaagtgatcatgttttaaaaaaattaattgcgacatctattaaagatggaaaaactatcaataactcattaaattatcttttttttactgacaaagagttatttctaaatgaaaaatattcaatattggaaaaagataaatatggaaatttaattcctcataaattatcttttcataatgaatcattaaattatgatattttttcaatacggactactttattagcaggatttatctttatttcagaaaaagtagctaacagattaattaaagaaaatatcaaaagaataaagctaattaaattagatgaagtcttgaatcactattgtgtagattttaagtacgacattaaagctaatgtcaaaaaagggaaaataaaattaccctaagctaatagtaaaaagccggaaagatccctgtgatctttcagctttgttatttttatgtttaaaacaaatagattacagagttggtcttatatattaaatatataacttaaaatcataaaaatataaaacaaataagaagataaacagaataataatacagaaaaatataatatcaatggtaaatattaacatagtctatattttagctattttattcttttttttctcttaaacagcaaaaaaccggaatcacttccggctagcttctttcttaccgcggtgaatgccacgccaacgccgacgggttagtacaatggcaaggcatcaaggtaatcacagatatactgatgcaatgctctagataaaataaatctacatcaatcaattaataccatatcgaaacaagtagctaacatccaaaatatagctaaaaaagatatggagaatggcaatattattaaacccaaagatatgtataacactaatattcagggggaagacgtaaattaaaaaatcagacaaagcatctttgatgctctggagtaaaattttaggataatttaacatgggtaatataataatcttttatatggaacccgttgaattttttttaaaaattctgattctcatccggttctattgaaaaatttaatgaacacgaaattattgataataaaaatatgacattaaagcttattttcgatcaagacataccaggcaactatatggttttgagtaattttttctctgatctggtatctgaattttatcttcatgaggattataaaaaagcagaaaaggatatccttgacagaataaaaacatctactcaggatcaagttaaagaaaagatgagaaaaagaaaataatatcttataagaaagaagcaagagttggcttataacatagaatacgataattttctaaatgaagtaaaatatacctagatttgccagaaacatggaaggatttaaagggtgtaaatcatgacaaatatcataggaaataagtccacttttgctgttgaatactctcttgaaaatagaaaaaagttaattggtcgggcaagactctggattaacgggatttttttgggaagtttaggcgatacaatattttttgatggatatttaattggtgggcttacagaaattttaaataaaaataagttagatgagagatatttacttgatgatcatcatttaatctatgatttattagaaaatgacatgaatctctttgatgatgaaaaatatgatttagcaaaatctttctctgttaatttaggtacatggtcggattattttgatatgtactcatataaattaaccgataatctcggtattattttgtggaaatttattggtcataatgatgcattggaagatttaataggctatccacgctgtgtattttccgaacagtttagatatgatgaattggttaacataataaataggcttcatattgtaggatcttaatagtgaagctttttgctatctaaaataatcagttatagctgaaaaacatgtatatgaaaattaactaacccgaattctggataagaaattgacatgaagcctgttccaggagcaatgttttggtgcacgccgaaacagctccggggaggaacaggctatgaacaagttagttgaaattttctgcgatgtcgatgatttttgccgcttcttcattcctcaatgggaattattttgtttcgaaaaagggtaccgccagcgtcatcggcaaggccatatgcaccccagtgaaatcatgactattttgatcctttttcatatggcgcattaccgtgattttaaacatttttatctggaacatatttggaaatatcaccacaaagatttccccaccctgctcagttatacccgttttgtcagtgttgccccttccgttttggtcccactatgtagttatctgactcaattaaaaggaaaaccgaccaagattgcttttattgattccacgagtttgtgcgtctgtcataacatccgtatcccgcgtcataaggtttttaagggaatagcccagcgcggaaaaacatcaatgggctggttttacggcttcaaattacacttggttgttaaccatcagggcgaaattctcgcgctaaaagtgactcccggtaatgtgaatgatcgagagcctgtacgcgaattatcaaaatcgttaacgggttatctttacggtgataaaggttatctcagtcaggaactggccgatgatttagccaaaatcggtgtgactttcatcacgaagaaacgccgtaatatgaaagcacaagcgctgtctgagtggaataacttaatgttaaaaaagagatttatcatcgaaacgattaacgggcaattaaagaccatttctcaaattgagcactcgcgccaccgaagtataaaaggctttctgttgtgtgttttaggtggattgattgcttacagccttaaattgaaaaagccatcactgaaaattttctactcagagaaagatattttaatgacggcttaagcagaattcgggttaactaactttgaaaaatcagccggaaagatccccatgatcttccggctttgtaatagtaatacaggaacattccgcagggcatatatatggcccaccggggactcctggaaatcaggggcctcattttaatcctagagaatataatcctgcgtctggagatggatttagaaacaaaagtgtcgatggattaccagaacattataattttccttgaggcaaataaatgtggtttgatcatgctatttttaaagaaaaaattaagttcatgtttaataatgaactatcgatggaacatgttggatttgaacaatttttatattatgacacatctagattaaaaatttttttctgtagcaaaaatataccaaacgttattccagaaaaatggaggaggaaaaagtttaattgttttatgatcacattgacatgtattgatgtttctgtattggaaattaatgggggaggagttgcatttgaatgtacccccattattgaatcaacgaaggaaaaaacagaaattacaataaaaaatgatggcttttacctccattgttctaccagaacaatggtaatagaggatattacaccgcattgggatgtacgatggactaaataatataaatagccggaaagagcccacgagatcttccggctttctgatgatctatcttggcatacagctatgtccatgatccggtcaattggattggctggctgggtgtaatacccaatttaattccagaaaagatgctcttagagctgcaaaaagagatattggcattcctaaaaaccagcgtccaaataagtatttaatcagaaacatcaaaatacaaaagaatatgatcaggtaatgttaaataagattccaaaatagtgctacatcttatgccacccataattctatgtataacaatgggttgaataaggctatgtgtagcagaattatgaaacgttatttaacagacagaaatggtcaacctatcttaaattaaaataaaaaacctatttggacaaggtggtgtaggtgatcaaggttaattttaatgtgaaacctcatgataatattagaactggtagcgttgatggaacagtagaccattatagttactaatggagatatatacccaagaaacttcaagatgcagtttttagcacctgaaaatggtcgttaattctagacatcagcgagtccgctatatccggtagcgttgtggtgaaaaatttgaagacgttgtctcgaaattcatgtttatccgcaaaataacggttatttcgaacctgttcattcatgaccttccataatcgctctattgggtttaaatttgggctatagggaggaaggtaatgtaactcaatattgctaacataagcccactccttaacaagatgagctttgttgtaacccgccccatccacaataagatgaattttttgatgatagtcaggataagactttcttatttcattgaaaaaacagcaaatgttgtagtcattgatggtttgatattcctggaacaccgtacgaccaatggcattcaggttgagcgcgcccaatatattcaggcgagtccggcttcctgttgtttttactgtttttttctcgccttttcgcatccagccataaccgagtttggtgccttgagtcgggtgaacagcatcaagaaaaaggatgggttcgtctttcgctgtgactttaagattctcataatattcaataaattgtcgctgtttttctgcgtcgaatttatgagggacgccacaaggttttttataagaaaaaccctgacggtgtagccatttattcatgccgggaatgctaaaggtaatattccagagctgagcaacataggccacgatttcatgggtgtgatggaaaagatgttgagataagtgattgattaaaaaatcagtttgttcttgagaaagcaaactatcagaccccccattatcagatttaagtttaccttgattaaggtaatcgctgatatgacggttaacggtcatttcatgaagacgcagggcctgagcgatcatcactgaactccagccttcagaggccagcaggaccgctttgatgcgatcacactccctcttatcacggcaggtgtgatggagatgttcaagttcggctttttgttcatcggtaatgaatattttcatagcgaggataatgatctccatttcggataaaatcaagcatcttcaatgattacgggtatatatgtattggactgatttaccaggtagtgaattgatgaagcgagtttattcaaatccaccatctatcaatgagatagatattttcagcattgatgtaaaaagggatgggccaacagtaattatgtcatttgatcttgtaaatagtcttcctgataaaactccagataaatggggtaaagattttaatagatgtagagcaggtatttactgctttggtgtttctaacttaaatatgcaaggaattggaaccgatatgcttacaaaaatagatattaaaatgatggataataacaatatagtgagtattaaaaataacgatatagatataaaagttatttgctcacatataagtcttactggcccttctgtttacataagaaaataaaaagatatgtgtttgtaaaattggtataaaaatcactaaacaaagccggaaagatccccgtgatctttccagctttgttatttttatgtttaaaacaaatagcttacaaggtaagacttatatattaaatatataaattaaaatcataaaaatataaaacaaataagaagataaacaaaggaataatacagaaaaatataaaattcataataaatatatacatatgctatattttagctattttattctgcttttcctctgaaacagcaaaaagccggaattgcttccggctggcttctttcttaccgaggtgaatgccacgccaacgccgacgggttagtgtaatagcaaggcatcaaggtaatcatcacggatatactgatgcaatactctggataaaataaatctacatcaatcaattaatactatatcgaaacaagtagctaacattcaaaatataactaaaaaagatatggagaatggcaatattattaaacacaaagataggtataacactaatattcagggggaagacgtaaattaaaaagtcagacaaagcatctttgatctctggagtagaattttaggataatttaatctgggtgagataataaatttttatatggaacccgttgaattctttaaaagctcggattttttatccggttctattgaagaatttaatgaatatgaaattatggataataaagatagggcattaaagcttcttttcgatcaaggcatactaggtaactatatggtttagagtgattttttctctgatttggcatccgagttttatcttcatgaggattataaaaaagcagaaaaggatatccttcacagaataaaaatatctacccaggatcaagtcaaagaaaatatgagaaaaagaaaatgatatcttataagaaagaaaaaaaggttagttgataacatagaatacgataactttctaaatgaagtaaatgacgaatgtaattacatgttaaatatgataagcatttatcgatatttattttattttaatcaagacgctaaattagaagaaatattttctatatttaaaaaaggagctatgccgtgcggtataaaaaaagataaaaagacatgaattattttcaatcctattattttgaagaatagttaataaaattatagatgaactgccctcaaaaactaaattcaacatttaatgactagatttagagaggcagttcacaatcaccagatcttccgatgttcctattgatctaccgtggcgcatacccacagtaagccagagcagattgaagcttaccgatggcatccctaatctgatacgcttcctcgtcattcacggcacaggcccgtatctccgcccagttcagccgcttaaccagttgggccaaggccagcgcttcaatgtgggttaactgaatgtcctgcaaatgttcaatcaccactttcattttatcctctcccttaacccgcaaaaccggttatcagcgcccgcatctgctgcttaatctcccgcagttgggcctgttgccgctggtactgctgatgctgttgttgcgtggcttcactctctggaatcagcaccagacaaccgtccatcaccttcaccgtaatctggtgttgtgttcaataagagttgctccccagattaaataccgtaaaacctacaaaaccagcaaaagatgccacacctttattttcacgtgccatacctagcggaatagcaatcgcgaacatcacaggcaggaaactgaaagccaaggagctgattttactcatccaggcaaataacaaccgaaaagctgtgtgatctaatatcggtagtaacgtaataacctctcggctactgggagagctgccaattccgagcataattccacaaaatgatagtaacgccacgggcaacataaatgttttacccaagctctggaagaattcccatagcgtaattttctgtttcttctgagtgagcagaatgactccagtggatattattagatactatttaataaatagcactacgggttatctggtgaagtggttcactattgataaatattttagaggaggattattggtttagttggagcactaaaaacaactcaaacaatcattactctcctttaaatcattcatatattgaacaaagaacaggcagaaccgtggtattattattctgccaaaggagaagtacatttggttgaagctgctgttatattttgaatagatatcattgtcatcttgtcaggaaaatctctccaacttctatttacaacggtactaaggtaaaaattcagttttattcaaattctcctaataattcatttgagtaatagtattaatcattcaattaatctataaggtaaaaaatataatcacctgataattacaaattgatattagttatatatagccaagtaatgcagctttagctattgcctggaatttattcttacaatccagttttttgacgatattcattaagtgaaaatcaactgtgcttttagtgacacaaatggttgatgaaatttcaattgatgtcatcccatctgcggtatatcttaatacttctaactctctgtttgaaaatgaagtttcatcaatatagaacgattgcaaatactttgtgtgtgatgttaagtatcttattatcctaatatatactcctaaaatttctccactacatttatacattgtctcgttatcaataggcccatcttttcccgcaacagaaaatattccataagttcctgaaaatgccggaagaccaaaggtgattccagaacgaaatccatatttttgattcacataccaaagctcttgcccattagatttggaaaaaaaatctaaatcccatatttttgaaaaagaaggtggcacaggccggaaatttagaacgggatcaatcatccaatactttttttctatataaaggtcccgccaagattcatgataattattaaagaaatacacttctcggttagagataggaaagcgcgcctttaataaaagggagaacaaactaaaccccgaaattttgttaataagctcacaaatttcagctacaaaatggggatctacatctaatttatgaaaattatagggtaaggcatatggtcgattaatattcattcaatgtcctcttgaaaattaagaatattgatagtgaatcctaatatttattatagtagcaaaatttacatttaataaagaaaataattatttactgttatacagaaacaatgtctgataaatcacaatgtattattggtaaacaggggaaattatatcaataggattgaaatcctaataatcagggaaaataatatatataaaaacatattatagtcatatgaagaatattaaactatctccaagccaatataagtgattatttaatgttttaatctaaaaccttcatccgtcattccgcaccgtatttctgatttaaaaataatgtgatcttacacaggttttttgtattgatgacatcggtggggttgacggtaatcgccaattttgatctattacttttatttgccggaaagcgaatatgtccacacctatacctgccattaaacgtctcgatcatcttggccttatcgccgctttttgtcatgaagccggtttaccccgcatgattgatgccattatcccaaaatattcatcgcatactgtctctcacggcgacgcttttctggcgatgatccttaacgggctggggtttcacagccggacattgcacatgttttccggcttttttcaacataagccgattgcgcgtttaattggtgctgacattgaagctgaacaccttaatgatgatgtgctcggccgtacactggatgccttatatgaagcgggggtgtcggaagtttatcaggtgcttgctgagcaagtggttgataaattagggttaaatcccgattccgttcatttggatatcacgagttttcatgtcgatggtgactatgacagcgcattgggagatgacacaaaacgtattgcactggtgccgggttatagccgggatcaccggcctgaactgaaccaggttgtccttgaactgatttgcgaaaatcaggcaggtatccctgtctatatgcaggctatgagcgggaatacgaatgatgccaaagcctttgcccagacgatcaaaacccatattcaatgcctgaaagcagcacaaaacagccgctactttgtggccgatgccgccctttatactgaagccgcgatcgcttcgcttcatcagcaaaaacaacgatttattacgcgtgttcccctgacgatcaaggaagctaaacagtctctcctgaacgtgacagcggagcaattcagccccatcagtgagggctattcaggctgctgggtgacgtcatcatatggcggcgttcctcagcgttggttactggtgaacagtacggcggcagaaaaacgtgaaaaccagactttccggaaaaacacactcagggaaacagaaaacgagtctaaacagttcgacaaactgggcaaaaagccctttgcctgccgggaggatgccttacaggcactgcatgattttgagtctcaatgccagtttatcggcatcgcctcgccggaaattcaggcgattaccgcgtatgcggggcgcgggaaacccggcaagcatcaaccccccaaatcggttcattatcaattagccggtcaggcttatacccggttagacaaggtgaagcaggccagattgcgggtcgggaggtttattttagcgaccaatgaacgggatgaaggacggcttgatatggcggcgttactggctaattataaggcacaacaaaaggtggagcggggttttcgcttcctgaaaagtccggaattcctgacgtctgccattttcctgaaaaaaccggagcggatagaagcgctgttaatggtgatgacatgttgtctcatggtttatgcggcgctggaacataaaattcgccatgaattgaaacaaaatgtgccgtttttccccgatatgaagaacaaaccgacacaatcccccaccgcgcgttgggtatttctggcctttgaagggatcagcacctttgaatttcaagaacataaaatggtgacaggaatgcaatcttaccaccatgagcttttgagtttattaggtgcacaatataaagcggtttattcctgaattaggtgcggaatgaaggcttcatgttttatttttcacaacaataaattaactgaaatactgaactatatgaagcaatacctaataaatatatgagtaattttcccatataaactatgatttatcccagtagctgtttcaactttaatagttaattatataaaaagaaagttattagaataataatgagtaagcaaaataacctttcgattcccaataaatagtttaaatatgtaaagaggtgttatgatgagtgaagtcattcagggtaaagatgatattgctataaccaagaattctattacagctgatgtaacctttgttattgatgttgattcaattattgaatatcttcgtaataataatcttaaaagttctctggatcctaaagatccaacagttatccgtcagcatgtatatatagctaattatactccagagcttggattgaaagtggcgagttcatctggtgcccgtgtcacggttcccattaatgcgaatattagatggagggctacaactgtatctaataatttcgactatacgattatattgtataaattcaaaaagcttagtataggagacgatgtcatctctgtcccatcacaaatatggtcacagaaccctatgggcaaaaaagttccaatggtcccttcaggtattaatgcgaatgaggatgaacctaagataatttttgtcgaatctcaagatagttatttccaagcaatagctcataaacccggtgtagaacaatatacatggttctttgccgcttatgacggtaaaaagctcctaggttattatcgatacgatccatatgttgaagtaactaatagctaaccatttgtatatttttatttttcactggaaaattatcaaaatagttttccagtatttttatttttcaatttacttaaatatctttaacaaacactaatttatataataatattattatcttataaagaaaatcttctaacctccaggtaaactctattcccctccataaattcaacaatcttccgacaattattctgccatcaattcagcagatattctttctattatctatttctttagctaaaataacttacaggaactattacatctgtcattatcgtctatcaagctaaataaccgtgaattaaaatttagcttattcttactttcttagattaatctttcctttctttaaaaatcttcctagtacaacccatgctattattaaaaaaaacattacctgttacttattccacttaagttaattcattaataagcaataaaatcatggctcttattaactcattactatccgaataaccaactaattaaaatttctaatagaaaatcgagatataaaagaaacgccactcgttaatcagagcaagatataaccaatagtgtgctttaataacgaataaattagccaatatgtatgtcattactatcaggctatcaccctatatttatgttttatggaataaaatatcatccttatcggtgaattaatgataaaaagaatatctattctcatattaggttgtatttcctttcagataatcgcttcaccggcagagataaatgataatctgccaatgactgaggctagaagaactttgcaagatagttccagggaaattaaccagctgatagaacaacgccgatatcagcaactaaagcagcaggctaatacagtccctgagtcaactcctgcgccagttttgccggaatctaagcaatgtctgccgttaaccggtgtttaccttaaagggatctccctgctctctgttcgggatttaagtacgctcagcgctttgtccccggcgtgtatcagtagtcatgatatcaatcggctcagccatgaactgactcatctttatatcagtaaaggctatatcaccgcccgtgttcagtttattgcgcctaataccgatggagagttagggctaaatgttatcgaagggtttgttgaaaaaatcgaaggcggtgatcgctgggtgaatagtagtatgttatttcccggtctggaaaaacaaccgctcaatatcacgcagctcgatcaaggtttagatcaggctaaccggctacagtccaataaaaccaccctggatattttaccaggaacagtgaatggtggttcggtgattaagctgcataatcagcgcagtaagccttggttattgaatatcaaaactgataattatgggcaaaagagtactgggaaatggcgggtccgcaccaataccagttttgacagcccatttggtttatccgatttcatcagtctgaatgccagtagtacgttagatagcccatccaaccggtatagccgtgcctatactctgctttattcaatgccctatggcgcagcaacattcagtgggtttggtagttattcccaatatgccagccgcccccatttacaaatgagaacaataaagatttatggtgatactcagcaaatcggcatgcgttctgattttgccttctatcgtaatcaatctcagattaatagtgtcagcgggcaattaacttacaagaattacaataattacatcgacaatgccaagattggcgtcagtagccaaacattgagtgtctttgaactcggtgttaatcatttacatatcattccaaccggattaatcacgctcaatctgagtgttgaacagggtttgccttggtttggagcacaaaccggaaccgcttatctcgataagcagttcaccaaaggcaagttgatggtcaatctacatcagcgttttatgctgttcaactcgccttatcagctcaataacctgttttatgggcaatacaaccggcacggtctgcccggtgtcgaatggttaaatatcactgatcggaatgcagtccggggatttagcaaaaatacgctatccggggataacggctggtatctgcaaaatacactgtcccggacgttccccctcgccaacagcacattatcaatgcgtatcggtattgataccggtcgggttcaaggatatcgcagcccacaaggctggcaaagcagcgcaggaatcagttctggcaccacactgagataccaacgcatggtattcgatatagaaaccagtcgaggaaagctactttccaatcgccaagcatctgatgaacccattcaggtgctagtccgtttttcttacaccttttgatggttttaagcagtacccaatgctgtacacacaataatataactaaatatatagagacttaatgtatgaaaaacaaaaaattcaggttatcccctaccggcaagcttgccgcttctatggcaatcattcttgtttcttgttctaccagttttgccagtgaaatcgttggtggtggcgacccagcacaccatcccgatattttcgctgccgaaggtaaagcaacggttgtgaatatcgtgacgccctcctcttccgggctgtcacataaccaatatctggattacaacgttggccagatgggcgtcgtcctaaataatgggctagaggaaggtcaatcacaattggcggggcagcttgccgctaaccctaatttgaatggtcaagcggctaacctgattctgaatgaagttatcagcaggaacccttccctgttattaggtcaacaggaagtgtttggtatcgcagcagattatgtactggcaaacccgaacggtatcacctgtaatggatgtggttttatcaatactaaccgcgcttctctggttgtgggtaatccattgatagaacaaggtaatttgcaaggtttcagtacgtttaataatcagaatagcctgaaaattaaatcggatggtttaatcgccaatgcgatccttgatcttatcgcacctaaaattgacaaccggggctcagtcactgctcaaaaagagattaatgcgatcagtggtgaaaataaaatctcagccacaggagaagtcattgattctcagcaagcgttaaccggtgtgctggatagctattatctcggtagtatgcaagccgggcgtatccgtctactcaataccgcaaaaggcagtggcgttaatttacaaggtactcttactgccagtgatgagattattgttgattcccacggtaatctcaatttagaagcagcacatctacgcggtggaaatattgatctcttgggtaatgatattgaggtaaaaggtaaagtcagcgaatcatcatatagccgtgatggtagcaataattaccaaagctatttcagcggttcttataccaatgatagtaaaagtagtcagtcactcgctcgtactaagcttgaaggcaaaaatatttcattagtcgccaacagtaataaccgggttacagccacggatatcgtaggtgatgatgtgaatctgagtggtgctaatctcactttagatgggcagcaattaaagcaatccactaaaaatattaataaccaacagggttattcttggcgccacgaggtaactcaggaaagtgaaaaactgcatcaggcaggaaacaatatccaggccaaaggaaatgcgagcttaaatgcgacagaaggtgacgttaagatccttggcagcaaaatagatgctaaaggtgagctagcggttacagcgaaaaaaggtgttcaaattgccggtctgactgagacagaaaaaagcgcggaaacaggttacaaaaaaaatcacacggctaaattgcagaccggaagttgggaagagagtaaacagaccgagcgtttgattgccagtgaattacaagcaggaactaatcttaatattaaggcaggaactcgtgctgaaattcttggggcaaaagtccatgcaggtcaaaatctgacactggaagccggtaaacaactgcaaatcgatgttcagaaaacggctgatagccgggctgtacgtgatgataaaaaatactggggagggatcggcggcggtgagaataaagacaacagtgagttgaaagaaaccaaccatgcatctgaattaacagccaatgggcgtttattgctgtcaggcaatgagggtattgccattaccggcagcaaagtgaaggcggtccaaggtgcttttgtaaatgctaatagtggcgaattaaccatcgataatgcggtcagtcatatcaatcgcaaagttgatgagcgaacgggcacggtactcaatatcactagcggttcaaaaagaaataatagccagcaacagaaatctcacggcagcgagttggtttctgaggcggatcttaaattactcggtgatgaagatatcaatatcattggcagtcgggtgcaaagtaccggtgcgcttagcctgaacacgtccggtaatatcaaggtgctctcttatggcgaacagaaacaggttgataaacaaagcacctctctggagccacaaagccacttccaaccaaagggagacaaacagtatcgtgccggaataggtattgaacataccagtaacagtcaaaaaaatcagacggtaacacagcaagcttccacgttgagtggcggtagcatcactatcgatgctgataaagatgtcactctacgtggttctaatctggtgacgaccacaggtgatgctaaaatcaccggtgagaatgttcatctgttagccgaggataataaaaaatccgaagaaaaatctcagagtaaaaagtacgttggggcctatcttaccggaggaatcgataaagtcggttccggtatttatggtcgttatgaaggaaataacagtaatcataccagtacaactgctgttgtttccggttctcagatcgcaggtaatttgaacattaaagccaacggtgaattggttcaggaagggacgaagcatgaagtcaatggcacctataccgcagaggcaggcaaagtcagcaatctggctgtatcgaatacagaatcaagtaccaatcacaaactacaggttggtacagatattggtgtcaacgtagattatagcgctgttactcgcccgattgagaaagtggttaaagaaccggctaaatctgcactggatggcactttaaccaaaaaaggcacacctaatttcggcgcggatattgccgccaacggcagtagtatccagactgcgaacaaaaagtccgaaacggttgtgacctctattcaggccagcgatatcgtcattaaaaccaatggcgaactgtatgatcagggcactcaatatcgggctgataaaggtaacgttacattaaccgccggtaaccataccagtgaagcagcacaaaaccaccaccaaagtagccacagtgaaaccagcggcaatgctgacctacgtgtttataccactaccggtgaagatatttctgcgaatggtaaaggcaaaggtggcacgcaaagcagccatactacgacgaccacagcagtcactagccggattaccgcagcagatgacattaatatccgcgtcgaaagggatgctgaatatcagggtacctctctgaatgccggctcaggcaaagccaatatagatgctaaaggtgatatccgttttgataatgccaccaatagcacaacgaaaacagcaaccggttataacggagaagcatctgctaaagggggaaattcgccagagggcaagaatgttcatatcggtcttggcggcggttacaacatagatagcaaaaacagtaccacagctcaggtcagtgaaattggcggtaagcaaagtgtcactttgagtgcaggcaataacttgacgttgcaaggtgctcaagtgaccggtaagcaaatcgacctgaacgctaaacaaggtaatgttgaactggtatctgctcaggatcgcattaacaacgatggttgggaatttaacctgaaaggtaatggcggaaatgcaagctcgatcaagaaagcggaagatgacagtacaaccaccaccacaaaacagaactttggcggggaagtcaaagtcggtattgatcgcctgcaagcaacgacccaacgtaatagccatattaaaggtgaaaatgttgttatcaacagtggtggtgatacaacagttgccggggcacggatagaggcggatcaggtaaaaggcagtattggtggtgatctacaagttgaaagccgtaaggatactgaacatgggttaaatgtcggtgttgacgctggcatgaattacaccaaagaatccaaagtaaaaagtgacgatatccctaaggacgaatcaactaaggatgatttttccaaagacgatgtgtcgaacgatgaggaattgaaagatgatccatctaaaaacccaaccgaagaaccacaaccgaaaggatggcaggaaagattaacctctacgtttaatagtcttaataatattaaaggtattaatggggttacaggtaaacttaaaagcaatgtcgatattaaagatcgagaaaatgtcggtgaacaatcggttatttccggcaatcaaggggttaatttagatgtaaaaggaaatactcatctgattggtgggcagattggtagcgagaaaggccatgtcattcttaatacccaaaatgtggaacaacaatctgttaccagctatgacaatagtaaaggcggtaacgttgcattacctgattctgttagcggaatagttaaagcagttcaagaaggtgtattgtccggcaaaatacctttagtgaaaacgtatagtaatgaaaccgaaactagtacaactaatggcgaaataattaatcgtaaatctgattaatttgttcttttataaaagatccttcaaatgagggatctttttattgctacctatattgaatatttcaatagttccaattgacaatgttaatgctttttcataatatcaaaaaattaataaacgacttggtaatataattatgtttggaattttcaagcgaaatttagaacttgaaaaatactataattcacaggttagcataaagggctctatatttttccactttcatactatagtagagctaacatgtcttttaaaccatcataaatgccagctaactgtaaagcaaaactgtaacaccttacacttccaacaatattctctataaaaataatcgactatttcctatatgagttgtttctttcagattgattttcatttgagggagatatctcatagaacatattacgcttacgtttgctcgatgtgccatgatatcttttgataaacagttgactgttttcttttgttaaaaaataatattcagggtaattattctctggatatagtaaactggcaaaattaggtacaatttgatttttgtcacgataatcaggataagggaagtactcttcagaataaacaatttctttgtttttgataaaaatgaattttaccccgacatcaataaattgataatgcataccaatcgccttttctatagatttaggacgagttcctgtagaaaagatataggcacgatcccaatgaaatggtgttatttcatttaaatcaattaagcattcctgatttattttgcaatgttcattggcaaaatcggcaatggcctctctaacatcccattttttgaaaaaaacaaaataaacagagacaaaaatagcaaatatgattaaaacaatagacaaatttttattcattaatttcatcttcaattttccccttatgcatagctaattttcactcatacttctttcttatattataataaaacgtcacttatgagtaattattttcgaggattttgaatgtattttatgccaggatgtatatagtataatttatacatagtaactatatgtaataattttttctatttttaacacaaacctcagattttcatctgaggtttttattatggctttagccagtttaagtagcgtcagcttcttaaacataaaaccacccgcatagctctgaggaatccccagaaaatagacaggcatagcgttatgtgatctactgattgttccaccaagtcaataaggtcactgctatgcctgtacgtgaagtatgtcataacttctttaaagatgctttatcaccatttcataaatatcgtcagaatgcattaatcgatgccactatcgctttgattaatggtgcttctcttacgttaaccagcattgggcgctttttacccggaaacgctcacgtcaaacataaaattaaacgtattgaccggctactcggtaatgaagctcttcatagggatattcctgatatctttcgcaacattatttcaatgctcactgagtctctgtcgctgtgtgtcattgctgttgattggagtggatatccgtcacaagaacaccatgtgctccgtgcgagtttaatttgcgatggacgctcaattcctttgttaagtcaaatagttccctcatgtgaacaacaaaatgtaacgatacaaaatgcatttcttgacaggctagcgcgtgctgttaaccctaaagccagagtaattattgttacggatgcaggttttcaaaatgcatggttcaaacatataaaaacgctcggttgggattttgtcggacgcattcgaggcaatactcaactaagacttgaaaaatagggtgagctttggtttaaacggcaagctttaaaagccactacaaccccacagtttttagggtttggtacattatcaaaagcagaatatgcacgttgcgatggttatttttatcttcataaaagaccgaataaaggtagaaaattcaaaaaatcacgatatcgaatggtgcgaaaatctcaggtcaaagatgggcgttcggcagcaatggagccttggcttatttttattagtatggatgattttaaacctcgtcaggtgatgaaaatttacagccgaagaatgcaaatagagcaaaattttagggatgaaaagagtgaacgttttggatttggtcttagagcaagttatagccacggggctggtcgtttatcagtattgagtctacttgctacactgagttcggttgtactttggctgattggtttttatgccgaaaataaaggaatacatcttaattatcaggcaaatagtattaaatcaagaagagttatctctcatctgacattagcagagaatgtcttacgccattccccgctaatattatttgaaatagtgcttaataaaaccctcaagcatctcgccaaaatctaccaaaatatggttttgatttattacgctgatttgtggggatccttcagcgctatgcaggtggaaatcaagggttataccaagaaaaacacctttccgttacgatatagatgttcaagctaatatacgtaactcaaataaggaaaggtgtttatgggaattaaagcacaaagctcagcacatacaaagtggctgtgcaagtaccctatcgttttttcgccgaaatacagacgaaaagtcatttttacccgtatccgttcgagtataagtgagattttacgagacctttgtcagtataaaggagtagaaatcatcgaagggcatctaatgccagatcacgtccatatactggtgagtatcccacctaaaataagtgtttcaagttttatgggatatctaaaaggtaaaagcgcattgatgatatttgataagcatgccaatttaaaatacaagtttggcaacaggaagttttggtcagaaggatactacgtgagtacggtagggctaaatgaagccacaatccgaaaatacatcagagagcaagaaaagtcagatttaatgcaggataagttaagtacacgagagcatgaagaccccttcaaggggtaagccaaagaagcaaagacacttagcttgaacgaagagaaagggcgtcatttaggctcagtcggtaatatgcccttatagggctagagcaaaccacccgctatgcgggtggttatgattatagattatttttcaatgagttatactttttcatttaccgttttcatcaaggctttcaaatacagacttcatataagcgtattgtacattggaaattttttctttaacaacttcgtagccatgagcattcttaacggcaacatacaacccttctttatgaaatttctctaatgcaatgagcgctaatgttttcattgacgttgtatttgaattcaacccaatatgacggcctatttggttattaagtaaatcaatagtttgatcagcgtcattgagaactgcaaattgccggatattcagatcaacccgagggtcaacttcatgtgcatcacctgcatgtttagcaattttctccccatatctggctgccagagtcgcctgccaaatcatatgtcgaaaagcattcacctgcgttccttcaccctgcatttccttgggttgagtgaatgtcccttttttctcatcaccttgtgttgcaaaacgcactgcattagtggtgatatttgtcgaacccttactgaaaaggccaatttccaatgcttcttttgggtacaacttggcaaaaattaattgcttcaccgaaggcgggattgccgtgttttgaccgtcatgaatagcttcattaatttctattcttgatttttcaagatcttctttgattctttttaatcgagcgacttctgtagtgagtgctctacttaatttagctttcatttctcgataatataaaaacaaattcctaacagctctttgatatttattcccaatctcattccaaaaatcatcagacttcttaatctcgttatttaaaaaattattcaaattcttctgggagttaatcattaccctcgatgtcaattcaattattcccacatttgtcgtatgtttcttatcgtaagggtacttattggcatcgattaacgttaatccttcaggtgtattgttaataatattaagcgctttattcattgattcaattgctttttcagatttggatttttgaaattctgagatgtaacgttgatataaaaccagttccccaagcgtcatacccgccaaattttttgtcgcttcctgaggggttttattagttaattctttctgttcagtaataatgctttctaatttggctttttgttcatgtgtaaaaccaggaatagcattgataatattgtcagagtttatcgaatcgactttaatattaaaatcgccaaaattgatgaaaggaatatcaaaatttctttcagcaccagaaatggaacctgccccccaattaatcggcacatctataaaatctgccaatcctgaggcaattacgtggccctgagtaattgaagttacacgaccttcaaagtgaaatttataaccatcattgccagggatagtaacgttaataggcgggaagttcagaggggaaattttcataatatgttccttatagaatataattgcaaaaataattatctagattacacctagcgtttcacgtaatcgtgtcgagtgagttattatattatttttgcaaaaatggttattccgacacagtgctattatagattttattatctattttaatagcaagtttttttgtattactactgttacaaaactaggggaatcgtatgaataattaaatattatccacacgcaaaaaccccgcttataatacttgctccaaaagttgagtttccatccagattcgtttatgtttcatcctcatatttaattttttttggtttattttttcagcttatttagatgtgattgtactttattatcccatatatatacctgtgctcattgaaactgcttgattttcgcccaaatgaagctcatggtatcagtcatgaaaatattcattaccgatgaacaaaaagccgaacttgaacacctccatcacacctgccgtgataagagagagtgtgatcgcatcaaagcggtcctgctggcctctgagggctggagttcggtgatgatcgctcaggccctgcgtcttcatgaaacgaccgttaatcgtcatatcagtgattaccttaatcaccgcaaaatcaagcccgaaaatggcggctctcagagccatctcagcgaaacacagactcaggcacttatcgcttatctgaccgcgaatcttctgcccaccacacaggctgttatccgccttgtcaaagaagcgtgggatatcagttacactgttcccggcatgaataaatggctgcaccataatggatttagttataaaaaaccgaccggcgtgccacacaagttcaacgcggagcagcaacgggcctttatggaaacctacgggaaactcaagcaggaagccggagaccatgagcctatcctgttcattgatggcgtccatcccacgcaagggacgaaactggcttatggctggatgcgaaaagggcagaaaaccgcagtgaaaaccacgggaagccgtacccgtctgaacctgatgggggccctgaatctggccgatattagcaaaacggtagtacgcgagtatgaccgtatcgacagttatcacatcgccgagttcttcattgccatccgtgagacctatccggtcagtcagaaggttcatattatccttgacggagccggttaccaccgaagcaggcaggtgaaagactgggcttatgtgatgaatattgagcttcattacttgccgccatacagcccgaatctgaacccgatagaaaggctgtggaaggtgatgaatgaacaggtcaggaataacccttatttcgcctcgacggccttgttcaggcaggcaatccatcgtttttttacggaaatattaccggaacttgccgggaacctgtcgtgccgtattaatgacaacttccaggttatgaatcctgcatcttcaagttaagcgggtatattagtaatttttgtcttgagttgtctgaataattttttatattaagcttcgctcattttgggatatgggtactataattggcgtaactcagtccttttagtgatttttggcgattgatcagaacgccaaaattggactaagctcccttcaaggaatctattattttgaaaaattatttaaatttcttgatataatgttacataatacatttgcctataaatcggctgagataaataaacatcatcaaactcatgtttatcatgcagtactttgtccctttcagccttagctatttcatgttgtagaataatagctacttcacttttatttaatttctcagaaagaattaatggaagattaaatttcacccaagactatcgcctggaaaatctttcctcgttaagctggtggcatatcactttgacaagtgacttagatttgacaacggaatcatctcgtagaaatattgcataatgagattactcatattcaagcaaggtaactatttgaggctatgcatgccaaagcgtacagaaaaacaggaaacaacccaacatcagccgaaaaggttatccaaaacgcctttggaaaagggaattcgtcacggtaaaaaagcgatttctctgacggtcagagtaggaaattatatccgcactattcctattatcgctcattttatccgtgcaacgctgcgttttaatgatcggatgggtaatcagtttggcgcggcaataacgtatttttccttcttatcacttatcccaattctgatgctctctttcgccattgccggttttattctggcctctaatcctgatttattggcaagactgattaacagtatcgccaacagtattagtgatccgactcttgccaatacgctgaaaaatagtgtcgataccgcaattaaacaacgtactaccgtgggattaaccggtttggcaattgcgctgtattccggtgtgaattgggttagtaatttacgtcaggccattcttgcccaattccatcctgtctgggtgcgaaatcaggaagataatgagaaaatctattttaaatattttcgtgattctatttctctgattgggctattattagcgctggtgatcacgctatcactgacctctatcgcaggctccgcccaagcaaccattgttaagatgttagggctagatggcattgaatggctgcgtccatcttggttcttgattggattagccatttctatttcagctaattatctgcttttcctatggctattctgggtgctacctcgccaccagccagaacgtaaggcgctattaaaaggaacattgatggcagcaataggttttgaagtgatcaagtatattatgaccatgacattgccgcgcctcgccaattccccttctggtgccgcatttggatctgttatcggcctgatgacatttttctacctattcgcccgtttaacgctattctgcgctgcctggatagccaccacagataataatcataaaaataccgaataaatgtgcccaagcagagcgatctgctaataataacccaatgaataaggagctgtttatgccgtttgttaatatcagaattacccgtgaaggtgctacagcagaacaaaagaagcaattaattgaaggagctactcagttactggccgatgtattaggaaaaaatccggcgacaacttttgtcattattgatgaagtcgatactgataactggggaatcggcggtaagaatgtgactgagcttagagctgaagctaaaaaatagccttcgataatgaagggcggtattgtccgccctttttgttgctttaagaggcttttgcctcagacttagacatcggtggttgtgccggaatatcaaccttatccttatgtggtgtcagcgacataatctgattaaagctgtttcttaactggtcgacatccatttccacttcccctttcggttgaatcagaataaatgccacctcttgcgacaggatctgcttcaattcacgattaagcatttctggggtcaaggaagctaaaaatgcttgtctcaaacgctgatactgctcaggggcgatatccaccacattgctctgttgggacaaaaggcgctgattaatcagaatatccgtactggtatgagcatacatggcaaacaactggctgagttgtgcttgtttttgcgcatatagctcatcaaattgtcccttcggcaatcctttatcccgtaatgtgaccaattcagccgccagatactccattgcgggttttaaattaccggctgtcgtgttgagattcagggcacagctcgcacgatgatactggactttacaatccagccccaatttcaacgctttatcattttttctttccagcccaagttgcagatagcgataaagtgcctcgcgggtgatatcactgatccaatagtgattaagcacatgcgaatcattaatcggctgccaattgagatcccaaattaaggataaagtatcttctttctttttatcgctgataatcccgatggtctccggtttcattggtgacaacgctgcaatagtagccggagtatgacgtttacctttcaatgatgaaaacgctaggctgatattttccggcagagtacggctatctacatgtcccgcaacgtataacgtcatcatgtcaggggtataccactgccggtaaaactgtttaagcttctccaaatcaataggttgaggcgcgttttgtgccggatcgtgccctaacagcgttgaacctttcaaacgtctacgccacacgggatcttgtatatcgggtggataggttgcaacggatgtatcagccattttcatggcatgttgcagtgtctcaggtgtaaataccgctttgcccgcagcatcagccagccagttcaacgcgtcttttaatagttcaggccgattatgtggcaaactcaagctatagagtgtgaaatcatatgaaacaatcgctggaggcagtgggtattttggatcaatagcactgttccataactgctctaatttggtagaagataagcttttgctactaaagagtacgactttcggaatcaaccaggtataacccgtttgttgggttttctccgccagtgaccccgttttcacgaccaagcgcaactgtattctgtcgttaggacgttgtggtgtctgcaaaatttgccagttaaaaccgttttccagtttaccttgtttccaggcagggtcaggctgcaaggcttctgcctgcgtctggcccgcaactgccagcattatcccaccaataaaataacgaattttcgtaccctgcatgtgaacccctatagatgtctatccttggttttagccttcgaaggtttaaccattgatgacagaatatgttcccttcgaccaataataacggtagaaaaagcaaaaacctgaattttaacaggcgaaatcctgtcaggcttataacagaggattagacctcaaaccgccatgaatggtttcatgatgacggaggtttatgcttatcaaattgacgattatatcccctgatcagcaggcccagttcatcatcctgatggtatttagggcaagccattggctctgatagttgcgcgttattaagatcccgtgcaatgtcacgtaatgggtgcataataatccggttgatacaccagcttatcgacaccgtaaggataagggccagtaataaataagttgtcagcatcagtgccaacgtattaatgacaaaacgatatactcggttggaatccacttgcaaaatcagatgccctagcggtttagcatctgtcgatactgaaccataaacatgaagaggaatactcacttccacagggatcccaaaaacacgtttagccagttcggggattgggcgatgggtagcaaagctcaatcgtatcacccggatatcctccggtaacaccacatccgcacgtcctaaaatacctacagtgcgcagccctatcagcaactcttttgctttactgagatcggaattaagtagtgcttccgttaaaggtgcctgtacctgaactgccgcattattaagctggctgatataatcatctttacgttgctgtataaaatgacacaattgaatcgtaataaaaatagcaatggtcaccagcgtgacgccggtcactgcggccatctgtttaatggttaacgaacgtttgacgcgcaatttcattttcacttaaaccaatgcctgtagatatcgcagttataacacgtgatcaatggaattgagtatacttgattttatcgctagcgatcctgtttcacttatccaagtcgttatttttctgaaataattgtccttggtagcgataagtcgctaccagaaatataagcaaatatttaaaaggtgataccggctaacccaatatcaccaaagatgttttattgaatatacccgtcatctttcaagttgcctctttgttggctgcactcgctcgccccggtcaccacatagtttgctatgctcccggggattcactcccttgccgccgcgattcatcttgaaatccatagggtataattgccaagcaattattccaccgtaacattttcatcctgatcgaccgcaaaacaggcgatcagttgatcaccatattgattcaattttggctgaaactgagtacaaacgctaagtgcccggcgacaacgagcggcaaatgcacaaccgggcggtggattcattgggctgggcaattcgccggtcaattttatccgttcacggcgtaattcaggattcagccttggcgttgctgataataacgcctgtgtatagggatgacgtggatgactgaaaatcatctccttactgcctttttccacacaacgaccaaggtacatcaccatcacttcatcagcaatatgttcaaccacagacaagtcatgggaaataaagacataagagagccccaattcttgttgtaagtccatcatcaggttcaacacctgtgcccgcaccgagacatccaacgcagaaaccggttcatccgcaatcaccacatccggctccaacattaggccacgagcaatcgcaatccgttggcgttgaccaccggagaacatgtgcggataacggctgtaatgttcggtttttaaccccactttttccatcatctgcaacactttctctttacgttcctgtgcgtttaacttggtattgatccgcagaggctcctccagaatctgcccaactttcttacgcggattaagtgaaccataaggattttgaaacacaatctggattttctgacgacgtagcttttcagagtctttatttggcaccagcagatcttgcccctgataataaagttccccgtcggttggcttttcaatcatcgtcagcaatcgccctagcgtggatttaccacaccccgattcaccaacaacggctaacgtttttcccttttccaattcgaaagagacgccatccaacgcttttaccgtcctcgcaggtgaaaagagcccccctttaatcggataatattttttcagatctgtcgcttttaataacggcacagtggatatttgctgcgccggataaagatactcactcatactgtcggcctccccgcatcatccaacggtatatggcatttcacctgacgttctcctaccgttcttaattccggctccacctgacgacaatggtcatttgcatagggacaacgcggattcagtaaacacccgataggccggtcatatttccccggcacaacacccggtaaagaggcaagacgggatttatccgtagcaaattcaggtaatgcccgaagcagcgcctgagtatacggatgacgtggtgcccggaagatttccgatgccttggcggattccaccacctgcccggcatacatcacgataatatgatgagcagcttctgcaaccaatgccaggtcatgggtgattaatattagcgccatattttcccgttgttgcaactccaacaacagttcaataacctgcgcctgaatggtgacatctaaagcggttgtcggttcatcagcaatcagtaattttggccggcaggcaatcgccattgcgatcatcacccgttgactcataccacccgataattggtgcggatacacatccagacgcgatgccggatcagggataccaaccaaggtcaacagatcaatcgcccgctggcgtcgggtgcggcgattgccgccttgatgcacttttaacgcctccataatctgaaacccaacggtataacaggggttcaagctggtcatcggatcttggaagatcattgccacttccgcaccaaccagttggcgacgttcctgttcagaaattttggtcagatcacgctggttaaattccagtttgtcagccatcactctacccggataatcaatcaatcccattacagccaatgaactcaccgatttacctgagccagattctccaacaatcccaacaacctgcccttgctcaactcggtaactgatgcggtcaacggcgcggaatggtgcctcttcgtcaccaaagtgaaccgataatttttctacatttaacagtgccatttcgccacctcactactgcttgagtttaggatcaagtgcatcacgcaaaccatcacccatcaggttaaacgccaacacggtcagcagaatcgccacccccgggaatgtcaccacccaccaggcactttgtgcaaactgcaatacatcagacagcattgttccccattccggcgtgggtggctgcgcccccattcccagaaaacccaaagcagccatatcaagaatggcattagaaaaacccagagaagcctgcacaatcagtggtgccagacagttaggcagaatattgataaacatctggcgcatggaacctgcccccgccacctgtgaagccgtcacatagtcgcggttaacttcgactaataccgcagcacgagttaaacggatgtaatgtggcagagacacaaaggtcaacgccagtgaagcattgacaatggatggcccaaatatcgccaccagcaccaaagccagcaacaggcttggcaatgccagcataatatcaacgatacgcatgatgataatatccaccacaccaccgaaataacccgccagcacccccagaacaacccccatcaatagggatagcaccaccaccagacaacctaccagcaatgaaagccgagcgccgtacatcagacgcgaaagtaaatcacgcccaacatcatcagtacccagaataaactgccaatttcccccttcctgccatgctggtggcgtcagcaaagaatcgcggaactgttcagccgcaccgtgtggggcaagcacccccgccaacagagcaaccaacaacatcaacacaatataaaccaggccagcaacggcccctttattgcgcttaaagtaataccagaactcctgcatcggcgtcataatcttaggcgcactgtttgcaggctcagtcacttgagacataatgtgctccctatttcttatgccggatacgcgggttaacgacgccgtatagcaagtcaactatcaggttaaccaagatgatcatgatcgccaccagtaatacgccgccctgaaccaccggataatcccggcgctgaagggcatcgatcagccagcgtccaagccccggccaagagaagatagtttcagtcaggatcgcccccgccagcatcatgccgacctgcaagccgataacagtgacaaccggcagcaatgcattgcgaagcgcatggaccacaatcacacgcatacgactcaaacctttagcgcgtgcagtacggatataatcttcacctagtacttccaacatagaagagcgggtcatacggacaatcactgccagtggaatcgtccccaagacaacggcaggcaaaatgatatgcatcaccgcatctttaaaatcaccggcttcaccccagaatagtgtgtcgatcagcataaaaccggtcagcggataactgtcatcaaggaaaacactgtcgcttatccgcccggataccggtgtcagatccaactggacagaaaccagcatgatcaacatgatcccccaccaaaagatcggcatggagtatccggttagggaaagtcctatcgcagtatgatcaaaaacagaaccacgctttactgccgccaagacaccaacgggaatacccacagaaatagcgaacagcatggcgcatatccccagttcaagcgttgcctggaaacggggaacaaactcttcccacaccgagatacgacttttcatggagataccaagatcaccatgtaacacattacttacataatgaaagtattgctgccaaagtggtttatccaaccccatttcggccattagctgggcataacgctcagccgatattccacgttccccggccataatggtcaccggatcgccggggatcatatggacaaaagcaaaagtcagtaaagtaatgccaataaacgttgggattaccaaccccagacgtcggagtatgaactgcaacatatcccgaactctctttttttaaatgccggttacagctctcaggccgtttggcttgataagggggaggactttccccctttggctcacaatttaatcaataccttaagtcagaacaggattattcgagagacacgttgctgaaaatatgtctgcctagaggatcaacgacgtaacctttgacctctttacggatcggttcatacaccgtggaatgagccacaatcagggctggaacctgttcgtgcatcacagcttgagcctgtttataaagctcaacacgtttagcatgctcagaaacgatgcgggctggctgtatagcatcttcaaacggtttgtaacaccatttagagtagttggaacctcgctctttggctgcacagctaaacaaagttgcgaagaagttatctggatcaccattgtctcccgtccaacccatcatgacaatttgatgctcgccatctttagctcgcttcaaatattcgccccattcatagctgacaattttggccttaacaccaatttttccccagtcagcctggaccatttcagccatacgacgggcattcgggttgtatggacgctgtaccggcattgcccacagatcaatagtaaaaccacttcccatccctgcttcttttaggagctgtttcgctttttctggatcgtactgataatctttaagatcattgtcgtaaccccacatggttggtgggatcagatttttggctttctgaccagcgccctgataaaccgcttcaacgatagcatctttattgactgccatcgtcaacgcttgacgaactttgacgttatccaatggctttttaatgacattgaaagcgacataaccgacattcagacccggctgttccagcaaaacgatatctttatcctgtttcatgcgggcaatatccgccggatttggatatggcatgatctgacattcgtttttctgtaattttgcataacgaacggatgcatcaggagtaatagagaaaactagccggtcaactttggctttatctccccaatattctttgaaggctttatacagaatgcgagaatctttctgatattgcaccaactggaacggtcctgtaccaattggattcagatcgactttctccggtgtaccggctttcatcatcttatctgcatattctgctgacataatagaggcgaaatccatgcctaagtcagccaggaatggggcttccgggcggctcaattcaatccggacagtataatcgtctactttttcaaccttattgatcatctcactcatacccatgccaatgaaatattcatagctgccgcctgacaccttgtggtatgggtgatttgcatctttttgccgcatgaaagtgtagatcacatcatcagcattaaattctcggcttggtttgaagtctttgctatcgtgccacttaacacctttgcgcagatgaaaagtgtaaactttaccatcatcgctaatatcccatctttcagccaagctcgggataatttcagttgtacctgttttgaactcaaccaaacggttatacagtggtctggagctggcatcataagttgtgccagcggtgaacaattgtggattaaagccttccggtgagccttcggagcagtaaaccaatgtttttgcctgaacgctggcggttacggccaatgcaactaagctgacccctagcttcaataacttcgctcttttagagaaagttgtcattttcttgcactccatttgtgatgttgttatgtacagccagaatccgcacttcctgtcagaaactgcgctgtctagattttgtttattattttcagcttatcaattaaacaactgttgtctcttgcgtcaataagatctcaacagatgtcataaacaacaggaaaacacaaaggaaactaataattaacatagttagcacaaaaacatgacaatgcgcacattttatagacaaaaagaccataaaaagctcatggatgcaggattaaccactgttaacctgtgcgcaaaatttgtggctgtttgattaattagtaaacgattatttcagagaaaaagatgataactggcataaaatgctgtgtgccgaataaagtcggcacctgaaaaataagttaaataagtataacattaataatataaataaatacaaaaacccgttactcgtttatctacttttcatcgcttctggtttcattaataattaactagtaaattaacgaccgttgccattatcaggtcgctattaatgctagataggtttcaaatattcacctcattcttcaattctcctaatttcttcataattttgttggataacatctttataccctatttgtcttttttatcttactcacaccaagaatgattaataaagaaactataaccgaagctgcaatcaaactttcaacagaaaacgcgatacgtgaatcaagatattggaaaagaatcgtaaatacaggtatcagtaaaaataataaagagacatgaaggggggtaatggcattaattgccttcagtacgagataaattggaagtaagtgcccgacagcaacaagaatcaacatcggaagaatcatatcaatattcaaactaagagaaacatcggagagtgaaatataacaaaatgaaagtatcaccattaaaatacttctaacagacaatatctcatatgtttgccatttttccttgaataatttcttagaaaaaatagtgtataacaccgttcctacagcaccaattatcacactaacaatgccaataatcctatcctgagttgaggttgatgataatccactatttcctaaaaatacattcactagcatcacacctacaccaatgagaactaaccaagatatgacgacttccaatttttctgtttttgcctcgtttttatcgataaaagatgaaaggaggattgttatcgcaggaccacaagccactgaagctacccccactattgcaggctcaagaaaacgtagcgaaatgattaatcccccccaatttaatagaattgagatattaacaattaacaccaataaggtgttcttgcggaccttcacaattaattgatcaatccctttgaaaatacttatcatcataaataataaagtagatgatataaagcaataaaagataacaatagctgaatttatcgattgcgttaaatacgcaacaaacacatcaaatgctgcactgatgaggcaaaaaataaccccatatattacgccattatatgaagacatatatcacctattattctcttattccaaaaattaaatttccgatattttattccttttgttattgcggattcatctttaatatttcctgtcgaacagtcaatcaatgtcatgtttagccgtatcttaccttctttttctaacgtattaacgatatgcaaaaatatcctgtctttatgcctactgataaaattttgatattcacgcttcgaaaatactcgattatcgtttattctaaacttattaatttctagtaaaactatgttacctatgtcatttaatttcatatttacattccatttgatgctcatagaatataatattcatacactattcttatgttttttcaaacaagtcatttaatgaatgagatatatttctcagatggataaattaaatatcatggatagtaattaaatgttattttttactatgatattattagtctatacctatggatttcaagatgcatcgcggcggcaagggagagaatccccgggagcatagagaactatgtgaccggggtgagcgagtgtagccaacacagaagcaacttgaaagatgacgggtatatacgtaattttcctacaggattactgatacaagagattaaataaatctcaagttaaatagcgtaatttatacaggattatgtggaattacattaaaaaatggaaagtcaatggaaatgttatctactgaaaaaaatgcttaaaagaaacgaacaatcaaatattatcagcccattcaacattgctgcacgagaattcaccatcatttactgtccaaggtgaaacctctcgttgtgaccaaattattcaaaaaggtgatcacgcgctaatagggataagcccctttaactcgcgtttttcaaaagactatgtagtggaccttattcagtggtcaagtcattatttccgacaagtcgacatattattaccttgtgaacgtgaagcttcacgccttttagtcgctagtggaattgataatgttaaagctatcaaaaaaacacatcgcgaaattagacgtcatttacgtaaccttgattatgttatttccacagcaacattgaaaagtaagcaaatcagagtcatccaatttagtgacttttcactaaaccatgactaccaatctcttaaaacacaagttgaaaacgcgtttaatgaatcagaatcttttaaaaaaagctgtcttgatatgtcctttcaagccataaaagggcgactaaaaggtactgggcaatactttggtcaaattgacctacaattagtatataaagcgttgccatatattttcgctgaaattcctttttacctcaatacccctcgattacttggggtaaagtattctacgttactttatcaccgcccttggtcaatcggaaaagggttatttaacggtagttatcctatacaagtagcagataaacaaagttacggaatcgtcactcaattataaaacacaaacagtctgatgaaatagtcactgcgtttaaagttaatacgctcttagtaccaaatatctttagaaaggaagcaaaataatggctaaattaagctctttcaacattcacgatcccaaattcataaaaaatccttacgatttttacgacattttgcataaacaagatttagtttattttgaacaatcccaaaatagctattttattggcaaatatgaggatgttgacgctattttaaaatcctcaattttcaatactaagccattaactgcacttgccgaaccggttatgggggatcgcgttcttgctcaaatggaaggtgaagagcatgcgtgtaaacgaaaattcataatgcaaggactttcaagagattattttaatcgctactacgaacccatgattcgaaagattactgaagatctcttacaaccttatatggaaaaaggaaatatagatattgttaatgactttggccgcgattatgccgtattagtgacattaagtattctcggactgccaagtgataactatcgtgatatagctgaatggcacaagggtatcgccagttttattacccagtttgaccaaacagaactagaaaaaatgcacagtcttgaatgtagtcagaaattaattcgcttactaaagcctataatagatcagagacggcgtaatcccagtaaggacattatatctatattctgtcaagatacagcgatgtccatgagtgaaattacagcactgtgtttaaacattctattagcggctacagaacctgctgacaagatattagcaatgatgcttaatcacttaatatctaatccgagtatgcttgatgtagttctcaaagatcgcagcttagttcgagatgcatttgaagaaactttacgtctgacatcccccgtacaactcattccaagagaggcgagtgaagacgtcactatttctggtatcgatatacctaaaggcgctgtagtattttgtatgattggcgcagctaatcgtgatccatcggtttttcacaaaccaaatgaatttgatctatatcgaagaaaaaataccacttctccacagaaagcaaatcgaaaaagacatttagcttttggtgcaggtactcatgcctgtgctgcggctgcattttcactcagtcagttggaagtttcatccaatattattttggatctcctgcataatttacgttttgctgatcactatcattatcaagaaacaggcgtgtatacacgaggaccttctaaactccttttgagttttgatccaatagcatcttctgctatcaaggaatagtcgcctttatctgaaaatcaccgtagagacgttgaattttcactactgttaacgaatgaagcacaaaagaaaaaaccccgctcaaaaagcggggttctctaaattctggtcggcgagagaggattcgaacctccgacccactggtcccaaaccagttgcgctaccaagctgcgctactcgccgaaaacgagccgaatcttactgcgctcgctacaggccgtcaatacctttttgataaccagagattagttgctgataaaaacaactgaaagccagtgatgtcgcactttctcacagatttcacatcacgcttaaattgacttgaatatcttggctgacgcatcagataccaagctgatcgaataaatcatcagcatcctttgcctgacgaatgtcttcaccacgatcactcttagccaaagtttcggcagtcaatttattaggtgctcgcatttcaaacggtaatgctttttccttcgcaactttagtcaaggtgatacgctccagatcagataggttaaccccataccaaccaaaacctcggtaaaatcaatgccaagggcattaagttccggctatcgcatttcacaacagccggaattgactatttcaggtcattattgcagtaacgaaatatctgccactctcaggaacaagtcacgcaactcacttaacaaagttaagcgatttactcgcacctgtaagtcttcatccatcaccatcacattgtcaaagaaagcatcaacaacttcacgcaaagatgccaactcaaccaacgcttcctgatagtgcccttcggcaaacaaaggcgccagcttatcctgtaaaactatcagatgcgttgccagtttcacctcttctggcgctttcaacgtagaaacatctactttctcgttcaatgtctcttcagacttcgccagaatgttagaaacgcgcttattcgccgcggctaacgctgcggcttcatccagtgtacggaagtgggtcaccgctttaacacgagcatcgaaatcagcaggctgcgttggacgacgtgctaataccgcttgaatggtatcgacgcggtagccctgctcctgataccaagcacggaaacggccaagcataaattccaccacatcatccgtaaccttggcatttgtcagcttatcaccatacaggcgaactgcttcttctgtcagtgtctgcaaatccagtggcaattttttctcaacgataatacgtagagcacccaacgcagcacgacgcagcgcaaacggatctttatcgcctctcggatgctgaccaataccaaaaatacccgccagagtatccattttgtcagcgatcgctaacgcacaagaaacgcctgtagaaggcagttcatcccccgcaaaacgcggttgatactgctcattcaatgccagagcaacatcctctgcttcaccgtcatgacgggcgtaatgcattcccatcacaccttgtgtatcggtgaactcaaataccatgttggtcatcaagtcacatttggacaacaaacccgcacgggtagcatgattcacatcagcgccaattttctctgcaatccaaccggccaacgcctgaatacgatccgttttatcacgcaaagtaccaagttgtttctggaacaaaaccgtctccagacgaggtaaattatcttccagacgctgtttacgatccgtcttaaagaaaaattctgcgtcggccaaacgtggacgaaccaccttctcgttaccgtcaatgatttgttgtggatcagaagagtcaatgttggcaacaaagataaagtttgccatcaatttgcccgcattgtcgtaaaccgggaagtatttctggtcacctttcatggtgtaaaccaatgcttcggctggcacttcaaggaatttctcttcaaatttcgctgtcagcacaaccggccattcaaccaatgaagtcacctcttccagtaaactgtcactgatatcagcaacgccgcctagcttaatcgccgcctgttctacatcctgcttaatgagtaccttacgggttgtataatctgcaagcactctaccacgttgctgcaaaatctctggatactgctctgcattatcaatcgcaaattcagattcacccataaagcggtgaccacgaatgacacgtgcggatttaatacccagaatttcgccttcaatcagttcatcaccaaacaacatggtaacggtatgaactgggcgagcaaactgagtctctttatcgctccaacgcatcaatttaggaattggcaacttatttagtgcactgttaaccatagccgccagcaactctttgacactacggcctttaaccagcgcacgatacaacagccattcgcctttatctgtcactaaacgttcagcctgagcagccgtgataccacaaccgcgagcccaaccttcagccgcttttgtcggtttaccctcagtatcaaatgcctgagcaatcgctggaccgcgtttttcgacttcacgatcagcttgcgcctcatccagattagcaacttttagtgccagacgacgcggcgtggcaaaccaactgatttcaccatacgctaaattcgcgttatccaactccgccgcaaaattagcagcaaatgcttcagctaatgaacgaagagccttcggcggcaactcttctgtgccgatttccaccaggaaagtctgttgagtcatgacagcctcttagttctgattcttgttacacatagggaagcctaacgcctcgcgggaggcataatatgcttcggcaacagctttggtcagggtgcgaatacgcaggatataacgctggcgttcagtcaccgagatagctttacgggcatccagcaagttgaatgtatggcccgctttgagaatacgttcataagctggcaacggtagcggcgtttctaatgccagcaggtcctgagcctctttttcatattgttcgaagcaggtaaacaggaaatcaacatctgcatgttcaaaattataagtggattgttccacttcattttgatgataaatatcgccataggtggttttgcccagcgggccatcacaccaaaccagatcataaacactgtctacgccttggatatacattgccagacgctcaagaccgtaagtgatttcacccgtgacaggtttacactcaagaccacctacctgttggaagtaagtaaactgagtcacttccatcccgttaagccacacttcccaacccaatccccaagcgcctaacgttgggttttcccagttatcttcaacaaaacggatgtcatgaaccgtcgggtctaaccctagcgccttcagagaatccagatacaattcctgaatattgtctggggatggtttaataatgacctgaaactgatagtaatgctgtaaacggttagggttttcaccataacggccatcggtcggacggcgagaaggttgtacataagcagcagcaattggctccgggccaagtgcacgcaggcaagttatgggatgagaagtacccgcgccaacttccatgtccagtggttggacaatggtgcagccctggcgcgcccaataatcctgtaatgtcaggatcagcccctgaaaggtcttggtatcaaacttttgcatgttggatccgcacgcgatacatatgaatttgaaaggaagtaggccagtataccctttgactttaagatatacagcactgaattcgctcttaatttcgccttgaaataaaaaaatctcaatttggttattttacttgtatatctatacagttaaggtactgtcaatgaccaaccactcatactgaaagtaacgactattggaattaacacgtatggaattaacacgctgccattgggttacctctgatcctcaatatctggcttatcacgacaatgaatgggggaaaccgctacaagatagccaaaagttgtttgaaatgatttgtctggaagggcaacaatctgggctatcatggctgactattctgaaaaaacgcgaaggctatcgtaaatgttttcatcagtttgacccggtaaaaattgccgtcatggatgaaaatgatgtggcacggctgatgcttgatcccgctattgtccgcaatcgcgccaaaattaacgctattatcaacaatgcgcgggcatatcttaaaatgcaacaacagggtgaagaattcagcacctttatctggcgttttgttgataacaaaccgattattaatcagtggaaaaccatcacagaggtgccgataaaaacagatctttcagatgagttatcacaagcactgaaaaaaagggggtttaaatttatcggcagtaccacttgctatgcatttatgcaggcaactggcttggtcaatgaccatataactgactgtttatgtagaaaataaattcagtgaattacaatagtctcaagattaacaccaataataaaactggatattaaccaaacatttagctctttattttaaatgttaaattaaatgccatattaaataattaatagtcataattttccagattgcacctcgataatacgaagggtatggtgttatttcttctactttaaataacacaccgacaacgaacacggctatgattttttctcaattcggtaacaagtttacacaagacgcaggtataacccgcctgatgaatgaccttaatcaagggttgcggacacctggtgcaattatgctgggtggtggtaatccggcacatatcccggaaatggatgactattttcagcaattactgacagagatggtcgcaagcggccaactcacggaaacactatgcaactatgatggccctcagggtaaagatacgctaattcgagcattggcagagatgctgcgcgaaaaacttggctgggaaattggtacacaaaatattgccttgaccaatggcagccaaagtgcgttcttttatctatttaacctgctagctgggcgcggagaagatggctctgtccgcaaagtgctgtttccactagcaccggaatatattggttattctgactcagggctggatgaaggcttatttgttgccaataaacccaatattgaattcttgccagaaggccaattcaaatatcatgttgattttgaccatctcaatattaccgaagatattggcctgatctgtgtttctcgcccaaccaacccaacgggtaacgttatcactgatgaagagttacaacggctagattatctggctcaacaacaccagattccattactcattgataatgcttatggcgtgccattcccgggtattatttttagcgaagctacaccattgtggaaccctaatactattctgtgcatgagcctatccaaattagggctgcccggttcacgctgcggaatcattatcgctaacgataaaatcatcaatgccgtcagtaacatgaatggtatcatcagccttgcgccgggcggtgtcggccccgcaatggcattggaaatgatccgtcgcaatgacctgcttcgtttgtcacaggaaattatccgcccgttctatcaacaacgggttcaagacgtgattcagattatccgtcgttatctaccggcggaactttgccttatccataaaccagaaggtgccatttttttgtggctgtggtttaaaaatctgccgataaccacagaaacgctttatcaaagactgaaaaaacgtggtgtgttaatggttccaggtcactatttcttccccggattggaacaagactggccgcatgctcatgaatgcatgcgtatgaattatgttcctgatccggaaagtattgccaaagggattgcgattttggcagaagaaattgagcgggcacatcagcaagcagcctgaaatcaatatagtaattaaatcaatatagtaaaaaagctcctgcccggaaatgcaggagcaaaatgataacgaggactttacataattattttcagaatttgtagaatgctttgtgcataaagaagagaaagaaacacgccttgtttgcccactctccttaagcagcctctattcaatcagaaatttctaaatccaatgcctcgaataggcgtgtttttgtgcgtttactgatggctaatgcaagagtacattacgcattaatgagacttgcagccgatatgccaaactgcttattcagtttacgaatcattggtagtgttagaagcaccaccaatacctaatccaacttcatatattttacagtttccaatccacaatccaaatgcagccgctaatgccaacatactcactgtaagagcaatatcactcataacccgtttcctttagcaaaagttaaaaaaccgggagattaattctgtttacttactgattctgtcagaaattaaatagccatgatgcagttaatcacacaaattataaggatttatcaccccccaaaggagcacaacactcacgataacgatgtgaccggggtgagcaagtgccattaacaaagaagcaacttgaaagatgacgggtatagactatccaaatcatcatgatgacgtacattattttttattaattaaaaaacagaaaaaaatcctgttacataaaaaattcacgactttttgatatcagggctatggtcaatgttgtataacctgattatagtgattgatgtcaaaactcttcatcaagagatttgggaaaataaaaattacccaacaagcttatgcaagagcaaactatttcagcggcttagccatacgagatcgatagaaccaatgaagaataataaattaattctattttgcgtcacattaggatggttgttaattagcgggtgcaccagcatcatgacacattcagggcctagccgcggttattatcccggagctaaagctaacattgaaatgttaaaagacaaagatacgggttgggtaatgaaaccattactcgcgattgatctgcctttttctgcgctattagatactctcttattaccttatgactatataaaatctgacgaagatcaatcaacaagttcaccaaaagagcgaattgaaaaaatagaaaaagcacagcgtcaaaccaaaaccaattaattgataatccgttccggtttatttattgccaccagcggagagtgaactgacggcaaatatatttatttcaatccggtttccaccaggaaaatttgcatataaccatcgacttcacgcataaatgcaatatgatgactatccggtgaaatcaccaccgcatccgcagcaggcgctttttctgtacgctttgtcaaacgttgcatctgaccattttgtacatcgcacagcatcacactgttatcacaaataaaagcaacaaactgaccgctattttcccaactaaaagcagattgaatgccacagtaactctgagttatttgacggagctcgccaccatttggcgatattgtccacaattgcacaataccattatcatctttcattagaaaaccaatctgttcaccattcggtgaaacacgcaaccagtgacgcgggttattcacgactcccggccagcgtttgtggctggtcaatgtcaaacgacgctgcattacactggcaggcggcgcaggtaacgttgtttccgtaccttgcagcggtttttcccctgctatcgcataatcagcatcctgttcaggtaaatcaacgatatagacttccggtactttttcccctgttgcagaaatagtatcgccaataaatgccaatgcccaacgctgccaattaccatccgctttacgatatcctgcttgacctacccaacactcttcataggcgcggttaatatcatcactgcccggctccggccggaaagtagtagtactaaccacaacggagaaatagctaccatcatattcacggggatggtgcttaggtggttcaactggtttgaggggcacagccacggcgatattgcgcaaatccagcgctggatcaagcttatgcataacatggtcgttataagtaaaacttagacggctaccatccgggctgaatacatgaacgtgactgcctccgcgcaacgctcccggggtataaggggcagtaatatccattgcatccagcgtaaccgcttttcccgaagaatcctcactgacaatgacgccccgacggtgatgaaagtcatagtgccattgctcatctgggcattctggcccatgaataaacgcatatcggacaggttctgttgggctgactgtcaccacgccaacatgagcgccctcctttgcctgatagataatttctgtttttccactctgcacatgaattttttctatcgttaaaccagtaaaagaagcaccgttgggacgaacatcataagctaaccattggctgtctggtgtccagacattaatattagtaagctggtggctacggttatctaacgtgatttgccgttcctgaaaggccattttattatccttgcatcaggttttttcggataaataatattaatccgaaatggatggaactaaaaaatttcagtcgagactttaccacttcgacattactcttacttttttatgctacgtacatttcatttctatgttactaagtgttctttatatcatcggtattactgctgaagcgatgaccggggctttagctgcgggccgccgtaaaatggatatgttcggcgtgattattattgcttccgtaactgcgattggcggtggctccgttcgagatatactactagggcattatcccctcggttgggttaagcatcctgaatatatcgtcaccgttgcctgtgccgccgtaatcaccacttgggttgcgccgatgatgaaacatttgcgccgcctgtttctgatccttgatgccattggcttgattgtcttctccattcttggcgcacagattgcgctggagatgaaccatggccctatcattgcttccattgcggcggttattaccggtgttttcggtggtgtgttacgcgatatgttgtgtaacaccattccgttggttttccagaaagagatctatgcgggtgtctcctttaccgccgcttggttatatattggcttacagcacacgccgttaccgcaaaacggcattgttctgattaccctgatcgccggtctgacagcaagattggttgctattcgctaccgtcttggattaccggtctttaattacgaacactccgatcactgagccatatcagcggggttaactacgaccccgttttcccggtcaaaacccgttatccctgccactgacagtttctctgcaatcgctttaatctgcgcgtcactgacaaaatcagacaactttttcaactgcccgacagtaagctgttgttttaattgtgccgcggctaatttctgctccagttgctgccagtgataaacattatcagacagcttatccatataaggcactccaatccctttcatccagtaggaaaaaggctgattttttgccttgctgaattgcgaataaatagcctgtgcccgtttatctccgattcctggtaaggccgcaatttgttgagctgaaagcgctaaccaaccggttaaatcagtgactaacttccgttcggtcaacattgcccaactaccgctactgacacctgtcatttgcagattttcaccaagccatttcaatcgtgcattaaattgttgttcacaacccaccgttaacgtcaaacaacttagtgcatgataatgctgcttatccggtggctgaatatcctgacgctctttgatccgccataccacctgagctaatttcgggataccatggcctgccaatgtcagcgtcacccgatcccccggtaatacatccaactgccgccaacgacgaacagaaccaatattgactctgcttatctgccgatcatccagtttcactttatccagcccaagaaccactgagattttgcccgttctgccaatagtaaaattaacttccctgacttgtgtaacctgatggcgtaaagggtgtttccatgccacagcccaactgttagatccagaccgccactggtttcctttaggttcaatttcctgtttcagcacgataccgtctgtagcaaaaagcatgggttgttcaaaatagtgcatccgcagtttctgcacctgctctggttcctctattttatgactgtagcgaagcgccaatggaaaccccatatctgccagtttgcgcaatttactttccatctccgcagggccatccggccagctccagataaacaaacctatttgttttaattctgacgaatggtccttacgcatcatcaaacccgcaacccgattacgagcgccatcactccccaataattgctgtctatgctcctctttatgcagaaagagttctccttgcaataccaaatcaggtggagcattttctatattctgcggaatatcgggaatatatcggctttttgctgtccaatttaccccttcggcaccattgccccggctgattaatgaaacaagtttcccgttctgataaaccaatgttaccgctacaccatcaatctttggctgtaaccagacaggtaatctaccgtgcaaccatcggttaatttcctgcttgtctttcagtttacttaatccggtatgagcaaccggatgaacaagcttattatcgggaaaaacttccacaggaaaatctgaatggggtgcttgtttcagacagaattgccaatgagtcagctccgacattaattgatcataaacctcatcatcgatctcgctgatccctttctgacgatagagctgatcccagtgcgccatctgttgcatcaagctgttagtttcacgttgtaatttgtcctgcgaccattcggggcaattcttttctgtattcgaaacaaaaatttcagccgcaactatcggtgaactgaaaacaatgaacagaattaatatcaataaattaagcatccgttgctccttggctatccatgcataacaacaaaatagaggataaagagatgctgtccaaggcagagataataactttgcgaagcgcttcgaagaataactgcctgaaatcccaaggtagcgggctttttcatacactacacaaagcagatatttatggtgaaagcctgatgtatttaatatttgattcagggctgccatcaacgattcccgccccagaggttctcatcgaagacagaggtttaataaccgataaacttatcacatacgataagttcaagggtcgatattaaatatgccacccaaaattcaggctcgtatcctaaaaaggatctcagaccgctgacaaacctcattgaaaataatggggtctgttcttttcataatgaatcctaatacaacccattttcctcattgacccgattcaatcgcccgtcagggggttagacactgtatttgcattttctgcaacccgcgaaaatgggcgagagcataaaaaactgtggggcatttatgtggcaaggaaaactgcctattttccgttcagttattgggtgataaataataaatcgctttgcaatttactataatttgctctataaattacagtagtctacattgtgaaatattcagaaattgcgaggtgacaacatggctgaaactatcgaccacggcaccctatcacatctagtggaggccggagccgttaaaggagcgcacatcgtaggccagccaggtggctgggccgtgatggtacgctatggaatgcacgagcgaccactggccgcacagcgcagccgcaatgtgcggctattccgcaagttcgaaacgctggtttcctaccttaaaaaaattggcattgcccgcttcgacgtggattcatcaaactacgcccccgctccccccaatacctcaacgcgcaggccagatcgtgccgaagcgctcaagcgtacccacgaggctgctgcatatgatgcgtggtttcgtgagcaggtgcagcaagccatagatgaacccggaccgggtatccctcacactgatgtcaaggccaaatttgccgccaaacgtgaagccttgcgtaaacgcattgtacagggtcgcgcatgaaaatcatttggcgaaagatcgcggaagcagatcgagaacgtatctttgattacatcgcacaaaacaaccccagcgccgcgcttgagcttgacgcagactttgatgctaaaatcgaactcgctgcgcagcggcctaaactgtaccgccccggccgtgtgcacggtacccgtgaaatcgtcgtgcggcctaattatgtgattgtctatcgcatcaaggatgaaagtggtacggtagttgtgctgcgcgtgctccatgcggcccagcaatggcccctggccaagtcaagcgagagcgtttctggtgggaaagtctgaggaagagtagcacttgaagaagatgtgacgattaatgctttcgtgaatcaagcgctagaaaatgaagtcagtaaacatcatgtagggccttaatagccccatcggattaatgacaaaagtgctaaccatcaggggccggtctttgatctaatagaggtactggaaaatcgatacctcgatatactaaaaacccccacacgacaacaatatgattgacatcaacagaaccccactttttaaatggggttcgtcagcaatctggatcttggtctcgcttataaacgaatgaaagaggttataaaatgagcaacttaaaatccctaaaatccaaagcattagctaactcagatgtaaaagctgagtatgatgcgctagagacagaattcgagctaattaatactttattacgcatgcggcatgctgctggtctaacgcaaaaccaagttgcacagcgtatgggaacaaaagaggcgaatatttacaggcttgaaaaaggaaacggaaacccaacacttaagacactattgaactacgccagagcttgcaattgtgaattacattttggcttcaaaacaacttaatccaaacgatatagaaaagtaccttcgggtgtgcttcatcagcttacgttcgcctttaccgatgaggatcgtctcaacagcacaaatgagcatcaatttgctcgctccattaggttttgcaatgattatcagttagcctgggagaaacctcgccattcgaactaaagcacacggtgaatacgattagttaatctattaagtattaatttattattgtgaaccattaaccaaggctgagccataatacctcggttcagcctgttgagtattcactttaaatctcatcacagccgctctctgttattactaacattaactttcaaataaagattaaaaggcaatgactttacgaaatagtttgggacgtaaatcctaaaaacccaaaaataactgacattttcataaacaggctagagcggatattacaacaaacccctagtgatttttcttccttgctttacagttaatacttagcatattaagttacatatttacgtattaataagagtagccataaagatgtacatcccccctaaattctgtatctcaagtctcataatttcaacccttaccacttatagataaaaaaataatctgaaatcaactaccaaaaaattaatttagcattaatctgaagttatcagccgataactatttcctattatctttttttaaaaataattgctaatcttatttatgtcttcgtagcaatagaaattcagcttaacccgcaagggataggttttatggcataggttccctgtaggtaaaggtaaatccgatataaccttaagttaggagagtaatatgaatcaagacgatttctcctcaaacatgagttccagcaatactcttacatgaacgaaaccgtgtaataacaacctgcacgggtgacccgatgcagagaataatcatctgaaaaaggagggcccttaaaaggccaatacaatctggccgggacagggttatcacaaagaatgaaaatttttaatatggcaaccggggagctatccccatcagagtattatcaacctaatcctgctgcaccctcttggaacccaacgtgggcagtcaaagctctcgggcaaccggtgataaatgggaaagacaacaggggtaagccaattcgttacccagaatcacgtaccagtcccttattgaatgtctttccgccagtaaaaaatcgtaattttccaaagccgagagtagacgatatgacgctggaacaaggcaggttctggataaatgcacaaaacagcatcttcaaggtcccacgtgtggtcacaggcacgtatatctgtcagatggttgccaaacgtaaagataaatctccagggaaagccacagtgaccctctatacggatgctaacgttgtaaattatatactctacaggttcaagggagacaaaaacgttatggaatctagcgtgaacgacctgatttacacagcaaactgccgagggaccggattttcatgggagcgtaaacccgaagagaaatttgaattggaaagtaagtgggaaaacgcggcactgacaattaaaatgcaagacacttgcgattggatttatgatgttgctttctggacgccaccaagcaacaatccaaatggtcagtttaaagacccagccatcctgagacctaatagctaacctggagaagccagatccctgtaataacccagataacctatccggaatgagaaggccggtagcagcaataaataaaaatctttaacagaacaaccggggagtaatccccggttgagcactcaatgaatacagttgacatcctccccgccacaaagagggtgtcgcaaaagctcatgttatccattaaaatctgcgctcttcctttaggcgcagatcttttatgaccttattcactcgaaaactggaaccgtctgcttacactaaacgtcatagcgtataacttatcaagggccgttgccctgatattatgggctatttttagcttgtctgggttgtcagttccaataacaggcaataaatctctgtgggtttattgtcaatgctggccttttgcgacaccctctaatttgaaatattagcttacctgccctctgttattaccaaattaagttactcgttcacgtaataatagtcataaagatgtatatccccgctaaatccctctgcctaaatctcattattaccactcttgtgatctatctgtggaaaataatctaaaaaccactaccaacaatcaggtgtagcattaacctaaggttatcagccgataacttttttctattagatttttacttaaataatgtctaatattattcatgtcagtaaaaattcagtttaacccgcaagggacaagtcttatggcataggttcccctgtgggtaaaaggtaaatccaatatataccctatggatttcaagatgcatcgctattctgcacgctaccctctgagtttttgggatacaaatagccaaggttacattggccgagatggttttccattccggtttcaactcaataaataatagtcatattgaattatctcatgtgtatcagccagcaatagctgataaatctagcggcaatagtaatagcagaaaatggcaggcaaatatacctaaaggctcggaaagcaacataaagtaatgcggacagtcagtgcaaagtggtatttgacttgggtttcctccgatcaagaggaagtgaataagagccggagtccagaggctaattgaacaaaacctgtcattaagacagataacctgtagtgacgacctgcacgggtacccgatgcagaaaataataaccggaaaaaggggaatctctgaaaggccgatgtcatttggccgggacgggattacagcaataaatgaaaatttctcacgtaacaactggggaactatccccatctgaatatcccatgaatgcgggtaacacattcatcaacagaatgaagcaggatattggccggataacggcacattaccgccagtggccggtatggatgatgtgcgtgtctgtaggggcgctcttttccacctcggtatttgccgctgctacacccaattggaacccaagctgggcaatcaaagctctcgggaatccggtgataaatgggcaagacaacaacggtaagccaattcgttacccagaagagggtaccagtaccttattgaatgtctttccgacagtaagaaatcataattttccaaaaccgataggaaaagagatgatgctaaaagacggcatgttctgggttagagcacaatacagaatcttcaaggtgccacatgtggttacaggtaagtatacctgtaagatggttgccaaacgtaaagatagatctccaggggaagccacagtgaccctctatacggatgctatcgttgtcaatccagacatctactggttcaagggagacaaaaacgttatggaatctaacgtgaacgacctgacttacacagtaaactgcctagggaccggattttcatgggagcgtaaacccgaagagaaatttgaattggaaagtaagtgggaaaacggggtaccgtcaattgaaatgcaagacacctgcaattggattcataatgttgctttctggacaccaccagacaacaatccgaataataggtttaaagacccagccatccagaaacctactagtacgggcagtgctaacctagcgaagccagatccctgtgataacccagataatatatccggggtgagaaaggcagatagccgcaataaataaaaatcgttaatagaacaaccggggagtaatccccggttgagcactcgaagtacattggaaatagataacccgtttccataacggtcagtttttacgtaaaccatttaaatattaccattcgaatattaattcctccagacctgcctcactcacgcttaaccctattatttatttactcgttcgcgttactctttcaatactttcattcgtatgacatctcaatgtatgtgatattttctttaccggaatacatccaccaaattatcaaccaatcacttttttctactatctttctatgcaaataacaggtaatgttattcagtgacaatataaatccggtttaactcacaagagtaggttttaccttatcggtagaaataccgccagtaaaaactgacggcagtaagagctaaaatccaatgaggtaacgtgtagtgacagcttgcacgggtacccggatacagaaaataataatcggaaaaaggagaatctctgaaaggtcgatataatttaaccgggaggggattacagcaataaatgaaaacttctaaagaatattatgttcatacgtatacacaacctagtcgacctcaaatcacgagtaaccctcaaatcatagactgggttccagagaaagccattttagctctcggaaccccgaagatatatggaaaagagaataacgataaattggttcgttatccagaaagtgggacaagtaccttagtctttcctaaaggtgatccacatttcgattttccagggacacgtttacctgataccgcagtgttaaaagatatgatgttctggattaaaacgaaaaaccgaatcttcattgttccacatgttgttacaggaaagtacacttgtgagataatagcctcccgcaaagatggccagccaggaaaggccaccataacactttatacggatgcaatcgttgaaaataatgagccccaatggttcaaaggggacagtaacgtaatggagtctaagctactcgatctgtgttacgaagtatcttgcgaaggaacgggtttttcatggcagcgaaaacctgaagagcaagttcaattcgaaaataactgggaaaatggggtgccgttaattataatgcaagacagccaagatatgcaaaatgtgatctatagccttgtgctctggtctgcacccgttgatttaaatcccaattttaaagatcctgccattcttttacccaatgaataaaataataaccagcagaaactaagagcctatctcaataggcgtaattgttgcagacagtttgaacacggacagcgcggaaaaaccggagcgtacacgtagtacgtgaggattttgagcactgcccaggttcgctctttatggcaaagaagggcaaataaaatagctctattgggataggcagtaagagtaaaggtcatttatctggaatgaagcgatagcaacacaatgaaaatctttaaccagacaaccggggaacaatccccggttgaatatccaatgaatacggataatatactgagttatcattcaccttgttttttatcaatctgaaatatcacaatattcaattcaagttattatactgattttccaataaaaattaaaaaagcgataacttctcacttcaaatgagaagtaaataaccaattactgtaactgttaatatttacactaaccatttaatatcatgacgtcgggtttaactcttctgagtcacatcattcacgttcaatcacattatccgcttaccttttcatgttatcctttcaatactttcattcgtataacacctcaatttatgtgatattttctttactggaatacatccacaaaattataaactgatcgtgtttttctattatctttttattcaaataacaggtaatgttaccccgtggcaatataaatctagcttaactcgcgataaaccgattttatcttataggtaaaagcaaacccaatattaaccttatttaggagagccaatatgaaccaaaatgaccatctctcatcaaacatggctaccggtgatcgttttatccagcaaaacctaaaatcaggcagagaaagtaactctggtggcaatacctccatcgtctctattgaattggcagacgattcgtttccgcaaaataacatttctattaaattgaaaaccgccatgttattgcaaaatggcagagtgatcacttggggaaaaaaacggtttgatacacaggaagccccgccaccaattgccgaatttgccgaattgcaaggtatcgtcagcctaagcgcaacacactctgcatttgcagccttgcaagcagatggcagcgtgtctatctggggtccattaatcaatggcctactccccttagaatcagtggataagatgaagaatattgtcagtgtgagtgcaattccaataagagatgttttcacgggcctacgggcggacggcagcatagcctcttggggagcagtggattttttaaacacggctctgccaagaatgtgtggattatcgctacacaatatcatcagcctaagcgcaacagagcaatcttttgccgccttacgggcagatggcagcgtcgtctcctggggattggattttttgccaaccccacccgaaattgccgcattaaaggatattgtcagcctaagttcaacaaataatactttcgtggccttacgagcgaacggcagcgttgtctcttggggtgtggaaattatcccgccagaaatcgccaaattacaagatatcgttagcataactaccaattataattatgccgccgccctacgggcagaccacagcgtcgtttcctggtggggaatagtggttccacccgaaattgccgcattaaaggatattgtcagtttaagtgccacaccgtatgcctttgccgccttgcgagccgaccgcagtgtggttgcctggggagatatagacattggcggaacattaccacttaagattgctcaactgaacgatatcgtcagcctgagtgcagcagattgtgctttcgcagctctgcgggcagatggcagcgtcgttgcctggggacaaccaagtcgcggtggttatgtgccaccggaaattgccaagttgaaggatatcgttagcctgagcgcatcaaactctgcatttgcagccttgcgagcagatggccgcagggcaggttggggaggaggagataccaaagcacatggtgaatacgattaatcagtaaatgtgttttttagcaggagagacgctggcctgaaaattgagttaatcctcataatctcttcacctgttatgaacgggttaacacactgcgttgaccgccagcaaatcaaataccgcaatacaggtgcttacaccctttaagcagaaacccagtttgacggggaagaaataggttttgcggcgcagaattcctacaaataaatccgatacagccttatcaggagagcaatatgaatcaacataacgagttctcattcagcacagagaccaaagacacttttatcaaacaacgatctggaagcaaagctatcagctatgatagcaatggcgtcatagactctaataactctggaaccgccatattattacaaaatggtcatatcgttgcctggggggatgcgcgctacggtggagaactcccacctgagattgctcaactgaacgatattgtcagtttaagtgcaacatatgctgctttcgccgccctgcgagccgaccgcagcgtcgttgcttgggggagtgcgggctacggtggcaaaatcccacctgaaattgctgaactgaacgatattgtcagtttaagttcaacatatgctgctttcgccgccttgcgagccgaccgtagcgtcgttacttgggggagtgcgggctacggtggcgaactcccacctgatattactcaactgaacgatattgtcagtttaagttcagcatatgctgctttcgccgccttgcgagccgaccgtagcgtcgttacttggggggatgcggactacggtggcgaactcccacctgatattactcaactgaacaatattgtcagtttaagttcagcatataatagtttcgtcgcctttcgagccgaccgcagcattattacttggaccagtagtcatagttatgtcccatcaagaaccgctcagctgaatgatattgtcagtttaagtataaatgataatgcttttgctgccctacgggcaaaccgcagcgttgttgcctggggagggggttatagcaattatgtcccatcagatattgctcagctgaatgatattgtcagtttaagtacaaatgatgatgctttcgctgccctacgggcaaaccgcagcgttgttgtttggggaaggagtgataggaatgatgtcccatcagaaattgctcggctgaatgatattgtcagcctaagttcgacaaattctgctttctcggccttacgggcaaaccgtagtgtcgttgcttggggagatctagataatggtggcatactcccactcgatgttgctcaactgaacgatatcgtcggcctgagtgcaacaaattctgctttcgcggccctgcgggcggaccgtagtgtcgttgcctgggggaagccaagtaccggggggtttgttccacccgaaatcgctaaattgcaggatattgtcagcgtagactcatcggggagcgcctttacggctttgcgaacaaatggcaaacgagttggctggggaggcggggatattaaagcacatggtgaatacgattaattgccgattaagccatactctttcattgtaacccggtgactgctccccgccgtaaaaaaacagcgaggcttcccacttctcaggccgcaaccgtctttatgacggatttacgctggcctccgtgggcagaaacgacaagtcccgccgcctgtaatgctgttatgcccttgcgctggatgttgatcgccgcattgatatcgcggttatgttcgactcgacagaaagggcattgccagatccgcccgctcatggactgccgccagacgtaatcgggccttgccgcggttagcactgcccttttaagacagtaaaaacgctcaaaataacgcgctttttcatctcaatgcgtcggatattatagtgcttcttaacaattaaaactccttgagaaattagccatcggcggaactcactgtatttcatccatgcctccttttcgaccaagcgatggtgacacataaaacagcaaatacaccatttttgtttcattcaacaacagttgtgataatacatagagcaaaattttaactaaagaagtcaacccttggcgatacaaaatatccattggcaatttttcccctaagaaaatttcggcggaaatgcatcggcaacgcgacatgtgtgaatgggtacgtgtatactgttataagaattttattctgctttatttaattattatccaatcaaccaagataccaccatgatccaaggcacgttatatattgtctctgcgccaagcggagcgggtaaatcaagcctgattcaggctttgttaaagactcaacctctgtatgatactcaggtttctgtttcccataccacacgtgcaatgcgtcccggtgagaatcagggtgaacactatttttttatcaccgaagaagcctttcgccagatgatcgataataatgaatttctggaacacgcccgtgtttttgataattattacggtacatcccggaaagtgattgaagaaacgcttgccagtggggttgatgtttttcttgatatcgattggcaaggagcgcagcagatccgcaaaaaaatgccctctgcccgcagcatttttatcctgccgccgtcaaaagaagagctctgtcgccgtctgcgcggtcgagggcaggatagtgaagatattattgaaaaacgcatggatcaagccgttgcagaaatggttcactataacgagtatgattatttaatcgttaatgatgatttcaatactgcattggccgatctgcacaccatcatccgttcagaacgcctgcatcgggagcgccaggcacaacggcatgatgctttaatcagcaaattattggcagactgaaccaagtttcagtatgatgcccagtcatttctttacctgtggagtcgcacacatatggcacgcgtaactgttcaagacgctgtagaaaaaattggtaaccgttttgacctggtgttggtcgccgctcgtcgagcacgtcaactgcaaacaggtggtaaagatcctctggttgctgaagagaacgataaagtcacggttatcgctctgcgtgaagtggaagagggcctgatcaacggtaaaattctggacgtacgtgagcgccaggaacaacaagagcaggaagccgcagaaatgcaggcggtttccgctatcgcggaaagtcgtcgttaatctacggtaggtctgccttgtatctgttcgaaagcctgaatcagcttgcccaaaaatacctgcccggggctcagattgagctcctcaagcaggcttactctgttgcgcgggatgcccatgaagggcaaacccgtaccagcggtgagccctacattactcatcctgtcgcagttgcctgcattttagccgagatgcgtctcgaccatgaaacgctgatggccgccttgttgcatgatgttattgaagacacgcccgccacctttcaggatatcgcccagcctttcggcccggtggttgccgggttagtcgaaggggtctccaaacttgataagctgaatttccgcgataaaaaagaggcacaagcggaaaatttccgcaaaatggtcatggcaatggtgcaggatatccgcgtcattttgatcaaactggcggaccgtacccacaatatgcgcacgctcggcgcgttacgcccagataagcgccgccgtatcgcccgggaaacgttagagatctacagccccttagcccatcgtttgggtatccatcatctgaaaacagagttagaagagctggggtttgaggcccttcaccctaaccgctaccgggttatcaaagaagtggtaaaagcggcccggggtaaccgtaaggagatgatccagaaaattctgtctgaaatcgcaggcaggctgactgaagccggcattgaatgcaaagtcagcggcagggaaaaacatctctattctatttaccagaaaatgcacctcaaagagcaacgttttcattcaattatggatatctatgcttttcgggtcatcgttaataatgttgatatctgctatcgggttttggggcagatgcacagcctgtataaaccccgcccgggcagagtcaaagattacattgccatccctaaggccaatggctatcaatccctgcacacttccctgattggccctcatggggtgccagtcgaggtccagatccgcaccgaagatatggatcaaatggctgaaatgggcgtcgcggcacactgggcttataaagaacaaggtgaatccggtaccgccgcgcaagttcgtgcgcagcgctggatgcaaagtctgctggaattacagcaaagtgccggtagctcttttgaatttatcgaaagcgttaaatctgatctgtttcctgatgagatttacgtttttaccccaaaagggcgcattgtggaattacccgccggtgccaccccggttgattttgcttacgccgtacataccgatattggtcacgcctgcgttggctcacgggttgatcgccagccatatccattatctcagtctcttaccagcggccaaaccgttgaaattattaccgcgccgggtgcccggccaaatgccgcctggctgaactttgtcgtcagttcaaaagcccgcgctaaaattcgtcaattgttgaaaaacctcaagcgggaagactccattgggctggggcgtcgcctgttaaatcacgcgttgggtagtgggaaaaaactggttgatattccaccggaaagtatcaataaagaattgacgagaatgaaactctcgacaatagacgatctgctggctgaaatcgggcttggcaataccatgagtatcgtcgtcgcccgtaatttgctaggcgcgccgccagaaaataccacaaatacctatcacaacaatggtgcccgtaaattacccatcaaaggcgctgacggtgtgctgattacgtttgccaaatgttgccggcccatccccggtgaccctatcatcgcccatatcagtcccggcaaagggttggttatccaccatgagtcttgccgtaatatccgtggttatcagaaagaacccgaaaaatttatggccgtcgagtgggatcaagagatcaataacgatttcaccgccgaaataaaagtggacatgtttaaccatcaaggggcgctggcaaatctgaccgccgccattaatgcagccaattccaatattcagagtatgaataccgaagagaaagacggccgggtttactgtgcttttatccggctcacgactaaagaccgtattcagttagcgaatattatgcgcaaaattcggatcatgccggatgtgatgcgagtcagtcgtaacagaaactaaaccggatagcccgtgcaaatcagcaggtgaacaatcaacagcgctatccaccgccgacccacaagacaccggcggcggatacggggctgacagcacgtcatcccggttatcaaagaacagaccaatcaatactgaatcaacctcatccagtatgcggtctaaccaaccctcctcacccacaccaaacatcaataccaatccgatagcgataaacaatagcggcaaaatccatgttcggcaccaatacgctaacagcatacggggataccgcgagtagcgaattttgttgcccaataaaaacccacagacggccaacaatatgatcccgataaccagtaccatccgacttatcagcatcccataaggcatcacacacaaaatcgatgaaaactcgcccttcatcatatcccgccaaacagccacatgtgtgatacgactcaggagataaacggaccacaagcccgctgcaaaaaccaagtgcgccaaatgcacatgtgattagcttgtgataatgtccgggagcgcgtcgacttcaccgttttcgttaccgacgcctgacccttctgaggcatgggttcaacgacggccgtaacaattagcatctgccggcgacttccctgcttctcacgaaagaagactttttcacaggcgatcacatcacgtcgctcattgtagatataattcatcacatctgttgcccggcgttctgtcactcggaacacctggctgatttcacttttggtaaatccactccccttcaataatccccaatacgcgactgccatgtacaacggtgtatccttcaaatgagacaaacaggccggcaaccgaaaatccccatgattactttgtttgccggtaatagtctgacctccaggcaaatcggtctggctaccgcttatctgaagcagcattgaatcattaacattgattgtcattttactctccactggtgactaacgggtcaatttgttaccacatgagaaatgaaatagtgcgatttattgagatgaaatacctatggcggctaagccaccatgccatatttaaataccttgccagcgcagcgttatttcatgactagagttgcctccatagacgttttgaactcaccagaaagcttggggtctatcgccttcgtttgccaaagctgcacagaaaacctgttgagagaatgatgagaataatactcgcctatttcgttgccgtgctcatcctttttaatttttttcacggctgacttatcatctacattaaaaaccagcacacttttagggtcagccgctgaaccaaatgttactggctgaccaatctggttgccgcctacaagcttagtctgtatgcctagaactcgcggcaacacttttatcgccaacgcgttatcgaagtccttacccccagtctcatcattagtgtccatcactatacttttaccatcaacaccgagatgcttagtagaaaaattcacaatggctacgcctgtatcgtccttattgggtgtatcgcatacaacacttatcaatagatcaaatatccctaccgttgcccggtgtaactcttttgggaatatcgcgtccgacggctcccggcgaatctctcctaaatcaaaattctcactagactgactttcaaaaatacactctggaggggatatcactgttacagggtctttgatagtcggaagaattggtctggaccaccacataaaatcccctccatcaattaaaatacccacaggtgcattaacattctgggtttcgaattcaactttttcagcggcctttcgctcccatgaaaaatttaccccttgacaagacacatcaaaagaaaggtcacttagttctgcctttgctacactctcatcatcctgattaccagtagttctcgccacgagcgctactggtgatttagaatactttgtccctgtaccatcgatatccaccgccatgttttccttgggaatggctactcctggacgaccatttgtaaatttggcttcaattgagcattcgtaacggcctgaaaccactctcgggactttaaaaatttccccgtgccctgctttgagccggaacttgacctgatccaacgttttactactaccccactgcatagacagtgttggaaacacatcttttaaggtcgctttacccgttgccggataagtgattattccgtcactccactttacctttcgagcaggccccagagcgtcaatggcgcgatcagcattccaatttattgtcgacgcggcgaacagtgtgggagaagaaaagatacccacggataggcatatcatccccacccatatcggcatcgaccaccagcgacaatgaaccaccatccaactcatatcctgttttatcttgttaataaatgtcttattcgtcttcatcggctgcccaaccgggagtaacttcccagttgtcctgttagaaattttcattcgttgatacaccccatcccgaccaaatcacatccgcctttcagagggtcctcttcctaataattatggttttccccattaggttgtcagtgcagaaccacaacacattgcctcatcttaacgacaggtttcgttcaattgcctcattggattccagcgtttatctgccttcgcctttaccggagggggccccaggttaaatgccacctcgcactgcttgtccggtgtactgccccacttcactttcagtaccccgctgggtggcataccactcagatacacttgtccgccctccccgactatcgcggccagatttgtgtctgtatcccctttaagccccgccattgccccaaacggcacgggcttaccgttataggtcaaattcatcagcaactgctgcccaatacgcacggggtaatccaccatcacaaccgcaccactcgtcgggaatacgttcttgctaccctgtgccatgtcagccccttccggcagcgatgacggatctaaactgatactattacggctgtacgtctgggcataaggcacaaccgcatatccccagcgattagtagtcaccgaactggaattcatcacacgaatacctgcaacccccgatgtccgcactaatacagcagcatcaccaatacgcgatgccaaagtaacgccatgctgatgtgcaatcagccctccactaaacccgtagttcacaccacgtcccccccatgaatcgtagttgtatcccaagttggcttgcccaaaggaaccaagatatcccattgacactgacccgctgcgccctctccctttattcgcctgactctgcgatacgttccaagacagactattatcatccagcaccgatccgcctatgcccaactggttattactgcgtcccgtactatcacgggaaaaactatagttagcatacgcattattcagcgccgcataggagccaaacagactcagaggaacgtttacgttcaacgaaatttgccgattttcaggccagtcgccgttaccgcgcatgcgatcaatgctgtaattaagcccccagcccacacggtagaaagaaccattcaatcccatcgatagggtggtgttagttttagagcttccccagtagttatcccgctgaccactgagccacagagaatagttaccgggcaatgactggctcagtcgcatctgccaactactgcgtcgccgctcagacatccaagaagggagttctccccaaacactgtagccttgagtgttcgcatccgaaaaactcaggtaattacgtgtggaatagcggtacgcggttaaatccaccgtcgtgccagtggtcagcatgcttttcgaatatttagcgcggtaagattccccacgcaggatgtcaggcgtattttgtaaccgagtccgggaagtcgtgatatccgcagataacgcccccatcatgcccagagagagcccggttcccagcgccgcggattggtacgattgcgccaccaggccaccaccgtataacgtgacgttaccaggcagaccgtaaatcatcgaggccataccaaacaccggcttacgtatgccgctgccatatccactactgtaataacgcccggcggccacttcgtacttgaattgcccctgccgcaacatcataggcagactggaataagcctgagtgaacccatggtgagtaccatcggcctcagttatcgttacctgcaagtcgcctccgacactgctgcccactaagtctgtgatacgaaatggaccgggtgccacgttggtttgataaatcacactgccattctgcgtcaccgtaatctgagcattggatttagctatcccactgataatcggcgcaaaaccactcagcctgccgggcatcatcgggtcactagtggcaagcccaataccacgataaggaaaaccatcaaatacctgacctgccacactaccggtcgaggtatcccctatcgtcagatcactgcgtaacgccaccacgtcccgctgcaaataggtttgctgaaagttccaacgttgctgggattcggtcgtttttttcactgcgtcatcgaatgagtcataccggttatcagtttgactgctataagaataagtcgccgtattccgaagacgccaggcccccagattcaatctagaattgaagctaccgaacagactctgattagtctgtttattaccaaattgtgagcgttgattctggctgccattgatgctgtagttcagtaaaaaagccggaatgccctcctgccataacgtcggatcaaccaagccattcgttgaaggcttcatcgctatttggggtacgctcacattcagccgcatctgggaaaagttcaagcgggccgccgcttggggaatcaatttacccaacggactctctatcggcttatccaccggcaatgctttcaacgctggtatgccgctgatattaacaccagccgcttccaacaaatctggggtaagtaccggcgtcagctcggcattaccctcgccatgacgctggaacgtaatatcacgcgtatcaaaaaaagtaccattcacgtagatatcaacacggtaagttcccggtgcctgacctcctacggtctcaaactgtgataagtctaccggttgaccggaattcgaaccaaagcccaataaagccggatcaaaataatcacgcgctgttgcatgagcgctccatcccgtcagaaataccagcatcacccgacaaaaaacgagagaaccccccatttggtgctttgatagggtaagagaggtagaaataccttgatttacacaacgacaacaagtaaacggccgttttgaacgacagcttattgccggaatcaacactttcattcttaattaccatctcttatttaacatatagaggttcattgctcatatctcttctgtcgataccttgcaacatcgctattgaccactgccggatacggcaatagatctactctcttcatcagtgtctaacccaaactcatcaatagcacgccacgatacagtgacatgactaccaggagacactttacctgccggcagcgaccagctctgctgaccaaagggtggcaccatcctaaacaaatccttgcccggtacggcaaacgaactgacctgcaaagtctgcaacgttatccaaaacggtgacggattagtcagcatcacgacatcctcttttactgacgcgcttaactgtttcaccgcaccggcaaccccctcttttagtatcccttcaggacggtagaacaatttcaccgccagagctgtcaccattttcatcttgccagagccatctctagatactggtaattggttctcagaaggcaacatatgcagattcagaaagaacagagattctcgatctttcggcaaaaccccaccaatacgaaggattttcaacaccagccgttcatctgcccccacctttgcaatcggcggaataacgataaatggtgccttaacccccagcggtaaaccggtctctgggtttagttcttgtacgattgactgaatgagataattgttgtcgctgttattaatgagtgtcgaagagactccgttgctggatgattcaggataaatcacacgagtgtcattgagatgcaaccccttcagactctctgctgccctgagtggcaataccggtaatattattgccagaacacatgacacagttataacgatctgttttattgaaatattacgctccaccatgtcatgctcttccaatttcaaaatataaaaacatacttagtcggcccgtaacgtaccgctctgtagtctactcactccaccggcatcggtgatcatcgaccatgtcactttacttcccgccgtacctgccaaggaaaaagtcatctggccgaaaggggccaacattgacggggctttgttaagatctactgccttgccatcaaatttcaattgggcaaaagtctggtaatacggtgttgggttagtcactacgacagtattgcctgctcgtataaatgtcagtcggccataggcctgctccggtgtcatcggcagcttatctggccggtagataagtttaatattcatccccagcgcaatagacagagatgcaccaatctctcctggttttccattgccattggccttgctctcatctagtgttttcttcgccggaatcgcattaatacgaaaacgaaacagagactctcgatcagctgggaaatcaccgccggtacgtataactcgcatcacgttcaagctattaccctccatgcgaaacaacggaggcaacacggtaaactccgatgaacgggtatttgagttatctcccggagtcacagcagcttgtattagatacacctcatcgcctgaattctgcaatgacatgctttgcaccttgtcgccctgatgataaataatacgtgtcttcctcaacataagacccgcatgtgctggtgacgatgccataaccgcccatatcgccagcattcccatgactatcatctttttcatatatcccacttcatctcagagaatcagataaaatcccttgaatacacccggcttaacaccatctactgatacacgaactcaaaatgtatattcacatccgctactcctccgcataatacattgatgctgttactcccggttttacaggttactggattatttgtatcgcccagacctcccacatacgccctgaacctcctcattgctccctccaatttcccaccatttccttttacactgtctgagaggtctaccctatacgggtcagtctcattccttacctctacaaacttgttagttccctcgtcgaataacctaacccctactcctttagtactgttaaatttggcatcaggcatgaaaagctccggatctgttatggcaggcacatcactccatatgtagagagcgggtcttgattcgcctagatcacagtcactaaacataaagttcagttctaagggatctcttgcgatatatttgctatttctaagttcactggcatagaccggagcgatataataattataaaaatcggcaaagctggacccattcacactcaacacacaggtcggaggcaataacatgcctctgaaattgattgtacgattcgtatttggatccttcgcctgcactgggaaagtcgtcacacaaccgatggtccatccaatcagcatcatgaagagcaacacatattttgccctgctgtgatatgtcattaattcactgtttataagattgctatttttcgttttcatctaactctttccgcctctcccaatttttatcatccgtgataaatcacacctcactgataagaaaatgtaaatgtgacgtgcgcaatcagcgtgccgggttgaataaccttactatctctcccacgtgcaattgctaccgttacatcagtctcaccactgccctcatcaaattcaaccggaacattgatttcgcgatgatttattatcaaatcatcattcagccctatttccttcttttcttctccgattaaaataataaaccccagcccctcagaagccccaggatcaccggaattaggatcactaaatattgaaccctgttcagcgtcgatggtatttccagatacagtgagcttggggacaaagcccacactatccggatcgccacaattcgttaatttcaacttaaatgacttggtggctgatacatccccttcatgactaaactccgccgccagcagggaaccaaaattcagctccgaaccattaatatcatcaccatcgatctctatgtcacaaggatcaggataaacagttacattcacctgtacgtctatcccactcgtgatcgtcggtgggtacttgggcccggtcttgggcttgggattggggtcatcagccatgacgctgcttgccaggaacagcagaaccattacagaactccagcagaagcagcgcatcacaacctgcaataccgggtttctacccttgggcaggaaggtcgacgggtcattcagcctgctttttttttgttctgtcgctgtcccaaacatcgtgctcacctcaaattaaccctatcactcttctgttaacgcgataccacgctgcaatgccgatacatcaacgataattaaacgtaaacgtcagtgtagccttgatttttcctgcctttttgcagaccgctaccgtctgcccgcctgccaaagcacataccagtgaaaatttcaccggcacagtaggcgttttatcgtttacgattgtgcctttattagccagatgaaacggttcatcgtcctttaaatctggggaccattctgttccactaaacttcttcaattgcacagtgatgcccactgccgttgaagcttcgtttttttcatctgcccctttatcacgaaacaagctcttatcattcgtaccaacatgatttccggtaacggtaatcgtgggagtaatactgttgctattgaccacactcgtgcaatttctcagcgtaatctgaatttccctgttaacttttcctaataccaagtctgcaaactgcactatgcccagctcgatattattgctgtccacaatgacatcacacgtgccttgcgtaatttcggccctaaatgtggccccaacagaattcgctgcccacaagggaccagaaaagagccacagaaccccacccatgccgatgtaattcaggtacctgcgtagatgctgaacccttgagatatcggctttactgaatttcaccatcgaagttctctccaccgccgagatcgctaatcaccgcccattccaccttctttttattctgactattctgagcgggataaacatgggtgctgaaaggtgccaacatttgtggatgactgtcagaaaacttcaccggcacaccatcaactttaatctgggtaaaactgatgtgataaggcgaattattactaacttgaacgccaccgggagcatgggtaaaacgcagcgctttgtatgccagctctggcgtacccaccaaccccgttggccgataaaatagtttgatggtattgccgatggcatagactactccacccgcaatcttgtcaccttcaagacgctgcccagaaggcttactgctgggaatagcagcagcattaaaataaaagacactctcccggtcagtcggcaacttgctggtatcacctaagatgtgcaggacattagttcctttagggtccaaacgaaataaaggaggcgtgacgtaaaatggtgttttacccttgccatcaacggtgctggtgattttagttgtcactaggtaagggatattggttgttgtattgcgcaccgagactattgcttcagctttatcctgtaagaaaataatgcgtgtagcattgatgccaaatccgccttcagcccagctctgtgacgcaaacaaaaacgcggccaatacaaggctttttactatgatgttaggaagtcggagtttactgatcatcttttgtttctcatatcttggctcaaccagccagtagttgcctaataaaaggcatcatccaatcatctaggatttttcatcgaagaagcccgaggagatgctcctcaggctaaagccacataaaagttagtcatacgcataggagaaggtgatgggggcagtaatccgctggtttccaggagcatctgtgctctttgtggctatatatacaacaaattctgcataactattcttgatatcaggttcctctttgttgtctttttttacattaggaacgatcatagcaaccgtgctttcacttttaataggcgttaatacattattttctagataacttagtactatacctgcctgtttattaatatctttgttaaagagataaccccctgatccctccaaggtgttacctgtcacatacaacttaactttacttgcatctttattgtctgaagagcagtcagcaagaccaatagtgaaatgcctttcactatcatttataaattttgaaattcctgcgcctggaaatttcccatctgggggggctgtaaaagctgtttttatatggttccccgtatccaccgtcccatttgagccagggttagtaacatcacatgttgcagtcacaatcgaaccggtaacatttactatggcattattcgccgcattagcagccgaagctgctcccaaaaccaacgccgccacgacgcttatctttaatatctgtcttttcatttcattaatctctttttaactacttaactaaaatctggttcaaactcgtgcatcacgttttgacaaacagagacatctagctgtacaaatatttgtcaattaggaccattttgacaattgatatacaaaaatttttctgtgcaaaaacaaagcaatatggatataactatagttatttcgcaaattttaaggatatttaattatttaatccgaaattagtaacagtaatttctttaaagtaacgaaggaagtgtgatgtttttacatattggaataaaaagagtggattatcgaaatgtttttgtggtaggatagttgcgttttacaaatatatacaaatctatctctttttttattagaaaacttttagtataatttctaggcaattgtatatcaattgtcaaaatggtcctaactgtcataccttaacgtctaccttttatactccaaactccttgaaaacgttcagcattactggctgtatagcgtaccgtatggcgaatgtttttatgtccaagataatcttgtatcagtcgggtatctatccctcgatctgcaagagcaaaaccgcaggcatgacgcaacatatgcggatgcggatctaccgcgatattcgcccgttgccctaactggttgataatctgatagatacgctggcgagtaagcggtttcccacaacgcgacaaaaacagccaatcactatccgcgccctgtaaagttttgcgcactttaagccatgccttaatcgccttaacctcacgctgcaacaggggatggttagtacaaaaccctccctttaaccgcctgatatataaacatttttcttttaattccatgtcagataaccgtaaatgcctggcttcactaacacgaaagccgtggatatagctcatataaaccagacagtaattccgttctggattaggcccaacttttgccatttccaacatgctttctacttctgattgagtcagatattttctttggcccatgattatttctccaaaatatattgatagtacaacccggctatatcccgcttagaacagacataagctaggataaaatagacaccgctacccaaaacgatggcctattgttcaccgaggctacaagaggttatacagatatggggcaaaatttaaacaccttttttgattattttttcacctcacaagcacgttagtttacatttgactgacaggacagattattcaaaacaggctacaagaacctgtcgttacaaatcgcctttttcgttatagcggcttactcttaaggtattgatatggttttcaaccagttacgaaggaaaatattccattgattacgttaaactcgtctgtattattatggatggtaaacaggctcaggccgtgacctgcgaaacctgacggactaccatgcaatctaacggagataaaagaaaccttatgagaggcccattgcttgatgccatccctctgacttccctacgtggcgtcggggcaaatcaggccgcaaaattagcaaaaatagggctggttaatttgcaggatctgctgctgcatttcccgctgcgttatgaagaccagacacgcctttatactattaatgatcttttacccggtatttccgccaccgtcacaggtgaaatcctgcgtaccgatgttactgttagtcgtcgtcgaaccctgatctgcaaaattagcgatggtaccggcgtgctcacactgcgcttttttaacttttcggcggcaatgagaaacaatctcgcgaaagggaaacaggttgttgtctatggtgaaatcagaagaggcggtcagggtgccgaaattattcatcctgagtataagattcaaaatcatactggaaatgtacagcttcaagagacattaacaccgatttacccgacaacagaaggtgttcgtcaggcgacgctgcgtaatctcattgatcaagcactgaaattactggatacctgtacaatcaatgaacttttaccggaagaacttagccgctctattattagtctgccgcaagcactgcataccttgcaccgcccaacaccagatattgcgctggtggatctggaaaccggcaaacatccagcttatcgccgtctggttctggaagaacttttagctcaccatttgagtatgttagccgtcagagctggcgtacaacgttatcacgctcagccgttgccgactgaggacaagttaaaaccgcaattccttaatcgcctgccattttctccaacccatgctcagcaacgggttgtctcagaaattgaacaggatctggcaaaagatgttcccatgatgcgactgattcaaggcgatgtaggttcaggaaaaacgctggttgccgcattagctgcgttgcgtgccattgcacatggtaaacaggtcgccttgatggcaccgactgaactactggcagaacagcatgcaaatacattccggcgatggctggaacctttgggtattcaggtcggctggctggcaggtaagcaaaaggggaaagcacgtcagaaacaacaagaagccattgccaacggtcaagtcgccatgattgttggtacgcatgccatgtttcaggaacaagtgaagttttccggtctggcgctggtgattattgatgagcaacatcggtttggtgtgcatcaacgtctggctttatgggaaaaaggacgtgaacagggttttcatcctcaccaattgattatgacggccaccccgattccccgtaccttagccatgactgcttatgcggatctcgatacttctattattgatgaattgccaccggggaggacaccagtcacaaccgttgcgatcccggatacgcgccgtgaagaaattatcaaacggatcagaaacgcctgtcttgatgaaaacagacaagcctattgggtctgtacgctgattgaagattccgatgtgctggaagctcaagcggcacaagccaccagtgaagaattgacgctcgctttaccggaactgaaagtcgggttggtacatggccgaatgaaagccgcagaaaagcagcaagtgatggaagctttcaaatgtggagaattacagcttttggtcgccacaacggttatcgaagtgggcgtggatgtgccgaatgccagtttgatgatcatcgataacccggaacggctcggcttggcgcaacttcatcaattacgcggccgagttggccgtggcgctatcgcttctcattgtgttttactttacaaaacgccactgagcagtaccgccagaattcgcctgcaagtgctcagagacagtaacgatggttttgttatcgcgcagaaagatctggaaattcgcggccccggggaactattaggaacacgccaaactgggaatgcggaatttaaggtagctgatttgctaagagatcagggaatgttgccggaaattcagcgtattgcccggcatattcaccaacactatcctgaacatgcccgtgccttgattgaacgctggctaccggaacgggtacattatggtaatgcgtgattgaggatatatcggagcgtttttttgtttctcaacgctgccaaaaatacagatatctggttttatccaatcattaagatgctctgctatagagctttcttttaattattccgtttaattgttcatgtattatttctaaaggaatgcaaaatagaactacaattattcctaaattagcaccagcgttaaaatatatccccataaaatataaatggttttttattattttcttaaaaaatcgaatctaatacctcggattaattgatacgacgtgtcactattcgaagtcttttatcagctaactggggtgacaggtggttccgacatttttcatcaaattaagttgatgatgtgtacggtattagcgcaacattatgctcaaaggttaaaacgagaatagatgtaaatctatgataggaaattttaattaatgtaacattgaattactaagtttaaatagtaaatatttctattaactcaatgaatttaattttaaatattttcttttcgaagtataaaaccttgatggaggtcacgcaaataatagtagttttgttggttttcttatctatacttatatttcattatggtacgtgttaggatgtttttaaatcagagctaaataaatctacgttgatataatggagaatttaatatgatttatgccaaaaatatttcagataatgtggttaaagttgcaattagtaaatggagtagtgacgaaggtgatgatgaatatattgatattcctccaggagaggtggctcaatggggtagatcagataagcgcggttatttaatgtcattagcacgtaaagatagtgccacaatgttgtattcaataaaatcaaatggctacataattatttatactagctatgttgaaaataacggtagccggatagactctttatattcgataccagctgtctaaaaaattttattatcgcactagtttttttaatttaatttttcttacatcattgaatttaataaaaatattcattattgatatagtggaggatttatgatttatgttaaaaatctctcaactgaaccggttaaagtttcggttaataaatgtggagaggaaggtagagaggaatatttagctcttgattgtgaagatgtcaaggtgtgggatctctccgatacgcatggttttatattgtcagtaatacagaaaggtattgaaaaatcatattctgcttctcataacagttttattattatttttgatgattatgtacaagatagcggcaccaatatatctcatcaagagaaataaatgagagcttgtcatccgatttaattgagtgttagacaaaattaaatcaccataatcaggaatggaatctccattcctgaactatttatattcaacggtttgctacttttcccctaatgcttgtttttctgcttgattgataaagatatctccagcctctttataattaatcagttgttttatcaacttcctctgccagcatttccagactaggtgcttagtcccaacatttgataaataagataatagaaaaaattatcgcctgatacctataggttaatattaaattgttttttggtggttggttttagattatttttatcgataatgagtaaaatttaaaattatgaggcttgggcaacagaatttagggggaatgtacatccttattgctacttttattaatacgcatacatgtaacttaatttactaagtattaactgtaaagcaaagaataaaaatcaccaaaagaatcgtaatatcttttctgtttataaaaaagtgagttattttgtttctttaggatttacattaaaaactatttcgtagagagcgggagtgataaaatttcaagtaaatactcgataggttgaattattatatttttctcagtcattggttaatggccggcaataacaaaataacacttaatagattaactaatcatattcactatgtgctttaagtcctgaataacgaagtttctcggaaactaattgataatcattgcggaaccaaatggcgcgggtaaattgacgctcatttatgttgttgagacactcctcatcagtaaaggctaaagtaagcggatgacgataaaaacaaaatgacttttttatcgtaaaacaaaggtaaagaagagccagacaactcattgaattattttttactttattggaatatcatcacgctggacgctctgcattgccagacagaaaccctcaatcttatcacccagcgttagggcgatttcattgcggtatatttattatacaattcgtttacaagctatttcataagttttcgcatcttcccgtttaccaacagcgatcaccaatattacgatctcttcttctatcacttggtaaaccagacgaaagcctgaagaacggagtttaattttaaagcagccagccagattaccgtgtaatctggctgaatcaatatagggattgttctgtaacttccgtagcttctttttaaattggtcgcgtatgctctgatccagtttgtaccactctttcagggctcgttcgtcgaaatcgatattaaatatcatcaaggtttaccctgatacgtctagcgggatttttaagacggtcacgtaccactgctaagatgtctgcatcttcatcatgatctgccaccataacggaaacttcagtgaacggcagcttttcattctccacaacatatcgcagaaagagacgtagcgcatcagatggcgataagttcagtttctcaaatgtctgatacgcactttttttaagttcttcatcaactctgatctgaatagtactcataacgttatctcctgtaatgacatttgtattacattctattgcataacatttgtaatgcaataaaaattttttgctataactggagtatatacccgtcatctttcaagttgcctctttgttggctgcactctctcaccccggtcacatcgttatctatgctcccggggattctctcccttgccgccgcgatgcatcttgaaatccatagggtataaactttagatcaatttcaaaataaggtttcagtgtcggggttgtaaacccaaactatccaaaattttgttgcgttaatttcagattattaacaaagtgctggtttttttatcctgcactttgttttaacagaaagatcaatagtggtcggggtcgtgccaaaaacgttcgtttgggcaatcccattttatgatcatttaaaaaaaccgagatttgccactttatccggatgacaatccataagaaacatcatcatctcagtagcatctttgctcaggtagaagcggaccattttttcgttgaactcatacagttttgccgcaggcacactgattgcatcgatgccgttcgacatcaagataccgttcatcatgaaacgtgaagtgcgtttgttaccatcaaagaaaaattgctgtagcgccccgaaaagaaagaatgcagctccctgttcaaaaggccgacattcacgcaatgcagcaagaccctcgtgaaaaacacgattcaattctggtgcgccagactcagtaggcaacggcgtatgacgcccctgattgcccaaactgacatctggagtgtaatttgtctcctgcccttccccacggaacattccccactccaaagcttcattacaagcaacgatgctatgaagttctgcgaatgtggctttggtcaattcaaattgaccggttttcactaaaactagtaagcgcctggcactctctgcaagatttaagatctgttgctgatcagaaaccttcctaccgccgacggtgacaccgtccaacaatgttttcacttcggggaaagtaaagggattgccttcaagtacaccagcatcccaaacaaattctggcagcatccgatgaaagcggaagcatacccgctcaatagaatgaataggaacaataagaggagccgcagaccggtcccaacgaaaccccaatgcgttgaaaagcttcatcgttgctaatcctttttactatttcgaatgcgctaaattataagtaaaacacaataaaagaccacctccccaggctatcccgccagaaacgctctcacttgacgagcggggagcaaatgtcgcggaagcttattcaacttcgtcacgtgtgactatgacggaaattcttgatcgtcacccatccccggtcgtgatcgcatttagtacgaattaataattactgaaagtttttctcttgttataaataagattccaaaatagcgccacatcttacatcactcataatttcgcctataacaataggttagtaaattcgcgcgtggcagaatcatgaaacgttatttatattaatatgttagtgatgaattagatataattttttaatattggttaattttcggataaatatgaggaagtaaaataaatataaaacacctattttttgtagaaactattattcttataataattatgttgtttaaacaatagagagatgccaatgagccgtcgttatgcctttaatactaaattgattttttggtagttggttttagattatttttatcgatagatggtacagattaagattatgagccttggcaacaaaacttaatgaagaaatacggggttatttgatggctcagtatgctgtttaccgcaataaatcccctaaatcgagggagtaataccctttcattatcgacattcagaatgacctattagacgattataattcacggacaatattacaaagtcagtgacaacggtagcaaagaattgcctcaaatagacgcgttaagagcaaaagatacccaaaagtcatcttggttggcggttggctattttaattattggtagctccatgcacttttagctataatagctattcgagccattttagacggaaggtgatgtatggaaattattcccgcacaactagctaagaaccagtttggtgatctgcttatgaaagttcagcgtgaacctgtagaaattagtaagcatggtaaacgtgtggccgtggttatctctcccgaagagtatgatcagttcgcacagctcaagttacagaatttaaaagccgttctggctgaatctattgcacaagctgatcgtggcgaattgcacagtattgatgatgtatttgcaccgttgacagttgatgaacttgagggtagggcttaaggatgagtgtccggtttactaataaagccagagaacatattcgtgcaatcaaactctattctatgcgccgatggggggcgaatgttgcggaagcttattcaacttcgttacgtgtgactatgacggaaattcttgatcgtcacccatcccccggtcgtgatcgcagtgaggatctttattttggtgtgctaagtttccccgtagagagccacattatttactaccgggaagttccgacgggtattgaagtgttggcggtgttgcatcaaacgcaagatccacataatcatctataccctatggatttcaagatgcatcgcgacggcaagggagcaaatccccgggagcatagagaacgatgtgaccggggtgagcgagtgcagccaacaaagaggcaacttgaaagatgacgggtatataatgaagagcataaaacgtgggatactttatttaattcgcaataaaataagcagctaaacttttgtatcagatgcttgagtgagttacccgagcgccgttttcctcagaaacctgagttgtcgaactatttcatccggttctcaccaaaatcccggctggaggtcaggaaaagttgttttgtaggacgaaggaaattcaaaaaaatccctcgattttcaccgggggattggtataggaaagagagtggatcttagggattatctggttaaatctgacaaacaagagctgtatcaagacaatttcgttggaaatcatcccaaaaacctgggggatgagcctcaatatctctttctaacagcatgggtttttgccatttaaattgtttgaaccccgccttttggatcgctgtttgatattgttcacgactccaacgatacatagtgaaagggctgggtggtgtggtaagaaattcagctttcacgagagtggtgtctttcaccggctcttcactcagaatttttatacaataattctcataattccctttctctaatcgataatcaggttcaaaggtatacgcaattaatttaccggcaggcttgagatgagcggcaatgacacggaacatagtttcaaggtcttcaagagattctgcatggcaaaataaccaagctgcattaactatgtcaaacttgccaaatgactccgactccatcttgcagatatttcttacgtgaaattcgatatcgtcaccgtattgttgtgatttgcttttcgcaatcgctatcatgttttctgatatatcgactccaatgactttcgacgcaccacgatttctgtattctcgactaaagagaccatatccacaggctaaatctaacactgatttcccgtgtatatctcctgccaggttgaagatagttctgatttctactttgatatggtcagtagcatctgaaaagctctcgtaaagatgtgcaatagggccatataaagtgttatctttcatgttgttatccttagctaaaggccaaaatactttatacccgtcatctttcaagttgcctctttgttggttgcactcggtcacatcgttacctatgctcccggggattcacgcccttgccgtcgcgatgcatcttgaaatccatagggtatatttatcgaagaaatatattatttagtacgaattaataattactgaaagtttttctcttgttataaataagattccaaaatagcgccacatcttacatcactcataatttcacctataacaataggttagtaaattcgcgcgtggcagaatcatgaagcgttatttatattaatatgttagtgatgaattagatataattttttaatattggttaattttcggataaatatgaggaagtaaaataaatataaaacacctattttttgtagaaactattattcttataataattatgttgtttaaacaatagagagatgccaatgagccgtcgttatttgaggaactatttccatcctttaatgtttaacggtatacccgctatctttcaagttgcctctttgttggctgcgctcaccccggtcacatagatagaggcgatagaagtattattatcagaatgactactcctgtccggttgtcaatattatttcatctattcgccgttcgaatttgctctgcatccgggtgacaatccacctaacaatgttttcacttcggggaaagtaaaaggattgccttcaagaacgctagcatcccaaacaaactccggtagcatccggtgaaaacggaagcatacccgctcaatagaatgaatcggaacaataagaggaaccgaagatcggtcccaacgaaaccccagagcgttaaaaagcttcatcgttgttcatccttcttactatatttgaatgcgttaaattataagtaaaacacagtaaaagaccatctcgcctgatattccaatggaatacaggcgaggctaacgggatctatctggacccccatacatacaggtaagaggtgaaactatgacggtgcttgcttaaaataaataatgattaaagaatacaaagacaatactgcaccaactgcatagcaggtgcagtatctctctaatttatccctacaccgccgggaaaacgggtaacagcaaatagagtttaatcacaatcgcgttaacgatatcgataaagaatgccccaaccatcggcaccaccagaaacgccacatgggatggcccgaagcgatcagtaatcgcctgcatgttcgcaatggcggtaggtgtcgcccctaaaccaaaaccacagtgacctgccgccaaaaccgcagcatcatagtttttacccatcactcgataggtgacaaaaattgcatacagcgccatcacgatggcctggatggtgagaataaccagcatgggtaatgccagcgatgccatctgccacaatttcaggctcattaacgccattgccaggaacagggaaagacttacgttgcccagtacagaaactgctcggtcaaagactcggtaaaaacctaacaccgatagactgttactgagaataaccccgataaataacacacagacgaacgtcggtaattcaaaccatgtaccttgcagaagttcagatacaaaattacctgccatcagacagatagcgatcaaggcgatcgtttccagcatcaccagtgctgtgatcatccgcccggtatacggtttttcaaatgctgtcggcacttcggtatcatcgcccctcaagcccggagtttttgtatttctcaccaggaaacgagcgaccggaccaccaatcaaaccacccagtactaaaccgaaagtcgcacaagccattgccacttcggttgcattttcaaaaccataacgctcactaaacagtttaccccaagcggcaccggtaccatgaccgccagatagcgtaacagaacccgccagtaagcccattaatggatccagccccaacagttcagccaaagcgatacccaccgtgttctgaaccagtagcaaacccacaacgacgaagacaaacgtgaacaggaccttaccacccgctttcaggctggaaagattggcattcaagccgatagtggcgaagaaagttaacatcaaagggtctttaagagataaatcaaagttgatttcccagcctgttgtttgtttaaccgctaaaagaattagagcaactaacaggccacccgcgacaggttcaggaatggtgtatttttcaagaaatgggacggattgtacaagtttacgcccaagtaatagtactaatgcagacgcaacgagcgtgccataaacatcaagatgatacatctatgtaccccagctatattgttaaaattatgtaagttattacgacgttatactcatcctttagagaacgccaaaagcaggcaacgctggattagaaaaaaaatctgcaacaaacacaagttaaaacatataaaaatgtgaccagagcgaatcatggcaacaaacagaatttttacgcaaacgattgcttttacgcagttgatcattaaaatgcgttctttgtcagtccggaatttcacaccatgctcacctcatcccctaaacaagctgaaacaatacccccgaaaaaatcagctagtgaattgatttatcgcttagaagatcgaccaccattgccacaaacattgtttgctgcctgtcagcatttactggcaatgtttgtcgcggtcatcacgccagcaatcttgatctgccaagcgctagggctgcccactcacgatacacagcggattatcagtatgtctctgtttgcttcagggctagcatcattgattcagatccgcacttgggggccaatcggttctggtttgctttctatccaagggaccagttttaactttgtttcccccttgattatgggcgggctggcattaaaaaacggcggtgccgacatttctactatgatggccgcattattcggtactttgatggtggcatccgttacagaaattctgttatcccgcgtattgcatctggcccgaagaattatcaccccattagtttccggtgttgtggtgatgattatcggtttgtctctgattcaggttggattgacctctatcggtggtggattctctgctatcgaaaatcacacttttggttctccagagcatctgtttctggccggtgttgtattggtggtgattgttttgctgaaccgccagcgtaatccttatctgcgtgtggcttctctggtgattgcaatgacggtaggttatgttgccgcctggctaatgggtatgctgccaccagcaacggtacaggaaaatggttcactcatgacaattcccgctccactctattatggtctttcctttgactggaatctgcttatcccgttgatgctgattttcatggtaacttcgctggaaaccatcggcgatattactgcaacatctgatgtttccgagcaaccggtcagcggtcctctatatatgaagcgtattaaaggcggtgttttagctaacggcctaaattctatgctttctgccgtatttaatacttttccaaattcttgttttgggcagaataacggggttatccaattaaccggcgttgccagccgtcatgtaggttacgccgtggcgctgatgttgatgctattaggactatttcctgcggtcgcaggatttgtacaacagatccctgaaccggtattgggaggtgccactatcgtgatgttcggtacgattgccgcatcaggtatccgtatcgtttccagagaggcacttaaccgccgggcaattatgattatcgcgctctctttagcggttggtatgggtgttgcgcaacaaccactaattttacagttcgctcctgactggctgaaaacgttactctcttccggtattgctgctggcggtctgacagccatcactcttaatttggtatttcctcaggagaagtagtttttctacaaatttgatctcgggttacccataatcgactcatcacgcacgtatacccgttatctttcaagttgcctctttgttggctgcactcaccccggtcacatcgttacctatgctcccggggattcgctcctttgccgtcgcgatgcatcttgaaatccattgggtatatatttcatcatcgtgcgtgatgatgatttatctcctagcggttggaaggccaaataaaatcgttaccaacccaaccatcaagatcgtattcactcatacactgctcagcaaaccctttcaattgatccactaagcccgtggcttgggaagccaataacacatcgactctgatagcttcgtggttgccggaataattgcgctcgtataattcatgcctgccagcgaattccgtaccgatcgagtcccaaatcagtttcatgagcttgactcgctcaactgcactgtaaccattggagccacgcatgtatttatcaagataaggagacagttccgggttggaaaaatcgcgggcatgagagttaatataaatcaaggcactgcccaaatcctgttcaataatctcttttacccgcgggtaacccagcgtcataaaccaacgataagctatcccatactcgtaccgaggcaatagggcatctccactccaaggctccggggatttaatcatcgcatcactgagtgcccaaaacatattacgccatgacaatacttcaccaacccgtgcttgtacgccacgaaaatccttcgtacccgtagcttcaacccccttaataagcaacccagaaagaaaatcaagtttaaccgccaatcgagtcacaccatgcaacatagcccgatgaaaataacccgattcagcaaaaaataacgaaactttatctacatctccatagataaatatgttttcccaaggaaccttcactttatccagaatcattatcgtatcgttctcatcaaatcgggacgagagcggataatcaaaaggactgcccattttatcagccgccattgcgtaagagggacgacaaattaatttcactcccggggtattcatcggcaaggtaaagaccaacgcaaattcccgtttctttattggtaaaccgtaatgaccaataaagttgtagtgactaatcgccgatcctgtggcaacaactttagcgccgctgacaattaatccatcatcacattctttttcaacatgaatacaaatatccccaatttcatcaggtgataaatgacgatctattggcggattaataatcgagtgattccagtaaaacacgctttcctgcgaacggatataccagctttttgcattatcagcaaaatcaccataaatttccggttttacgccgagcgaggtaagaaacgaagccttataatcagggcttctccccaaccagccataactcatgcgagcccacgcggcaatagcatcacgatcagcaattaaatcctgctgtgagcgcggtatacggaaaaaagggtgtgttacaccacaactccccgtatctgtcgccgtggtcagtacgtcacgataagcaggatcgtgcaaagcgtcgtaaagtttcgcaatagctcgggccggattttgaaaagcaggatggttgacaacatcgtgaatgcgttcaccataagcccagacttcccgaccatcgtttagcccatccagaaattccgttcctgtaagtgggcgggttgtgcggatattaccttcattcgacgatttttgtttcatgttttctgacatagaagattccttacattttttatttaccggaagatgggtgaaaataaactatgcagtgttatttcaagcatcaatcaaactgagaaaggaatagaaaggaatgacgaaaaaatatcattattccatttatagccatccattaatacattaattcattcggatgtcattggctatattatcatgcaataaaatatagatttaataattatattaatcacacaatataattattaacaaattcataaaaatattccaaataattaataaaacttagcacgaaaaacaaaaatacaattaattaaagattaatctccgaagtttattttaatagaataaaacgataacgaataattcattactttttcatttcataccctgaaattattagaaataacaactaatatagtgacttgttgatatttttattgttaaattatacaaaggaagctataagccgattggagtctgatgatgaaatggttaggaaaatcgctggttacactgttattactggtaatactggcagtaatcacggtttatgtcgtgatgcagacaaactggggaacacatcagcttagtcaatggctgagtcatcacagccgttatcaggttcaaataggcaatatcgaacataactggtcacaaccgggcaccctgacattttccaatattgtcattagcaatcagcaacaaactttcattttagcggctcaagttgccgcattcgatttcaactggcagcaactgacttccccgcgccattttcatcgtctgctattgcaacagggccaattaacaatcaaaggccagcaacaatccttaccttttagcgccaacattctgcaacttaatcagatggctattcagtcagaaaatgcaagctggcaaattcaagggcaaaacatcactggcggtatcactccttggaacccacaattaaatacgttggcagggaatggggaatttcaattcagcgctgataaactgaatttcaatgatatttctctcgacaaagtcattatgcgaggagataaccagcaaaataccctcactctccgttcatttggtgcaacattggcacagggttcggtatcaggtaatgggcaacgtctgcctgatggtagctggcagtgggataatttacttatcagcaatattcgttggcaaacgccaatggcacttgaggagttattgcgaaaaacgaacaaattacctgcaatcagtatcaaagatctgagtctcactaatgccaaactggaaggtaaaaactggtctgctaactatctggatgtctcagtaaaaaatgtcgggttgactaacgggatctggcaggcaaaagagggcatcattgatttcaacgttatggatattacgctgaatgatcttcatttcaccgatgttattggtcaccttcttcttgcaggcaatgaactcactatttccaatctcacttcccgttgggaaaaggggttattccacgtcaaagggcaatggaatcaccaaacaaaacaattcaacatcaccaatgctacggttgccggtttaacttataccttgccacaaaactggcatcagttgctgaaaaaatcattgcctaaatggatatcgcgattttccattaacgagctgacaattaacaacagcttactgattgatattaaccccgattttccattccagcttactgccctcagtggttatatctatgacatggaattactgaaagaagggaaatggggaatctggcatggctcttcgaatctaagtgccactagcgcaacatttaacaaagttgaattacgtcgcccttaccttaaattacatacagaaggagatacactgatcctcgatcaattagatgcttctgttgataacggattactgaaagtgaagggtacagtagatcaacaggtacagaagccatttactttagatttccggggaatagatgcagatttaacgattttgcctcaatggcggtgggtgccgttgaaattacagggtaaaggcaatttcacgctgttaatacagggagatcttgctgctgataatattaaaagtactatcgatggttcattgactgccacggataaacaatcaggcagcgaaacgcaaatcatcaataaggggcaaatatccaccccaaactgtgaaacctgtccggttgttaagttatagtaacgaatattcgggtacctatgtacccgactcaaccctataataattactttctatttcaatccattaataaaattttcgatcagtatcagccgaaaaaccgtattaatatcgatgacattaaaaacgcaattaaatttcacccatgaagttgtaacaaggcacaaaaaatgacgtgtatactgcctgaatccattgaaaacaaactgcaaaattatgaccgtattgttgtcggtggcatcatcagagatcaaaatggcaatattctgttcttacaacgagctcctgatgaatccccgccgaatctctgggaaattccctctggcggtgtagaaaaaggagaaaatctattacaagcactatctcgtgaaataggagaagagaccggactgtttcttgatgatgttattggttttatcagcgcagtggaatattctattaaggagactcgatgccttcagataaattttaatgtcatatgcactggtgaaattaagctttcgcctgaacacacgcaatatcaatggagcaatatagataatttccgcagtgaacttgatgactttatgttacgtgtattcaacgagtcgtgaaagtcccccagtggcatatttaatgccactgagaaatctaagcgatagccgtataagcattcggcaataccatgtaggtgccagtaaataccgcaccgattccctgatcaccactgacaatcacatccagcttcactctcgctttactgccttgtgccaaacgagccaaatcgccgctcatatttttaagatcggcaacagattttggcctgccaataaccggttttttgtaacggatatcggcatcagccagaatgatatcaccacctaattgacgttcctgtaacaacagccagatcaacccccaaccggtcagggttgccagagaaaatagactacccgcaaagatagtttggtgaggattttgattcccggcttccggcatggtggtaataaagctctgaccggtatattgagaaattcgtacccccattttttcactaaggggaatatgtttgtaccaagcctgttgcagttcgttgcaccaatctggccggtgaagaatatcatcaagtgttgcaaccggctttatcatcagaaaatgacgaacaggtgtcgtttgtgggctagtaattggcccacggttttcaaaccccaatttactgaaaaactccaccgcatgttcacgagcactgcatactacccgtttaacaccctcttgacgggcaacagattccagggccattgcgattaattttcctaaccctctaccttgcatgttgggatgcactgccagaaagcggattgccccttcactatccgcattgatatataaacgccctaccgccaccgggttgcctttctcatccacaaccatctggtgatgagccgtcgtgtcgtaaccatctttctcagagcctacaggctgatgcagtggcttccgcaacatttcccaacgaaatcggtaatatgcttccagttcttgttctgtttcaggtactcgcagatgatacatagaaactgcccctttcttttgatcatgatgtttaatcggggatggttgcgttctactggctatttttggttgctagacctgcaaccagaaagtgactggcccatcgtttgtcaggctgactttcatatcggcagcaaaccgcccgatttctgtttttacaccactttggcggcattgttcaacaaaatagcgatataattcgtcggccttatctggggcagcgccaccggaaaaactgggtcgcatgcccttttgagtatcagcagccagtgtaaactgggagacaaccagcaaactgcctccgatttgttggacgttcaagttcattttgtcctgttcatcactgaatatccgataccctatcaccttctcacacaaccgttttgccttctgttgatcatctcctttctcaacacctagcaacaccagcaggccgtgaccaatttccccaaccacttcgttcttaaccacaacatttgcctgtgttacccgctggattaacgcgatcatatttttcctttattcaatagtagcatcagcacactatcctctattatccgttcaatccctcattttgttcagaaaaaccgattgcttcgaaataatctggcactgtctgcctatcaacaacatgaacgctattgatccctaacgccttggctgcttccacattttccagcacatcgtcaaaaaacacggcctgatccggtgaataaccctctgtctcaagcacatatttgaaaatatcaggttcaggtttacgcattgccaaatcctgcgacaaatagaggtaatcagcggatgccgcaatctcaggataattatgtggccagtaatcgaggtgcaaacggttggtgttggataacacgacaacccggtgtcccgcctcacgcaatgttttcattatctgaatgacttcaggccgaatattaataaagatagcatgccatccagcagcaaactgctcaaaactgagtgaaatattcatttcctgacataaagtatcagcgaattccagatcagtaatttgaccacgctcatgtttttcaaacgtttctcccatagagaaacttttagtcaaagtcgcaagaggtgtcccgctcaaattactccataccgctaaaactcttttaaaatcaatctcaatgatcacattacccatatcgaagatatataacataattaccccctggctaattaataacttttcactttaatcgtatttccaatgagaaaacagtacggacaagtaaaaagcgaatcacttcacggtatttttcttacgaaacgataaagtagcatccagattaaaaaagtcgagtaaggtgttatagttatgttgtggttcctcctctgtatcggccttcttctggctggatattttatatatggcaagattgtcgaaaagatattcactattcgaccagaaagaaaaacccccgctctttctatggctgatggtgttgattacgttgcgatgtctaccccaaaagtttggttaattcagttactcaatattgccggcgttggccctattttcggcccaattcttggtgccctctatggcccacttgccatgctgtggattgtattcggctgtatctttgctggtgcagtacacgattacttctccggtatgctcagtgtgcgtgcccgcggtgcatccgtgcccgttatcgttggtaacgaactgggcaaaaccatgaagcatttcatgaacatatttgcggttattctgctgatgctagttggagtcgtctttgttttgagtccagccggcttactgaataacttgctgaaagaggcaatgggttgggataacattgctatctgggtcggtgttatctttgcttactatattctcgcaacgctggtgcctattgataaaatcatcggtcgcctttacccactgtttggtgcattgctgctgtttatgtctgttgcgctgatggtcggtttagcgatgagcgataaacctttctattcacaaggattggatttcaccactaacttcaacccgaaagatctgccgatctggccattgctgtttgtcacgattgcttgtggtgctatttctggtttccacgccactcagtctccgctgatggcacgttgtatgcagaatgaaaaaaatggccgtttcgttttctacggtgcaatgattggtgaaggtattatcgcactaatctggtgtacattgggcctgagcttctatgaagatactaacgcattacaagccgtgattgatcaaggtacggcctctctggttgttcacgaagtgtccacgtctctgttaggtactgtcggcggtattctggcaatcctcggtgtggtgattttgccaattacttctggcgataccgcattccgttctgcccggcttattattgctgaattcctgaatattcctcagcaacaaatgaccaaacgtctgttattaagtgtgccaatgtttattgtcggttatctgattaccaaaaccgatttcaatattatctggcgttatttcggttgggcaaaccaaaccacagcaatggtcatgttatgggcggcttccgcatggctgctgcgccgtaataaattccattggattactaccctaccagccatgtttatgactgcggtgtgcttcacctatctggcatttgcaccagaaggttttgcgctaaactggaatatctctgttgttatcggcctggcagcaatggcggttgtcacaatgactttctttgcaaaagtccgctcccaatcagcttccgataatataaaagctaaagcattaaatgagtaaaaacctaagaagaaattaaatatcacaacagcccctcacgataaaaagttgaggggttttaattgccagcctcctttatcgtgataagcaacacttattcctcccgaaaatatcaggcaagatatcacatggatattgataatttaagcgttacgccagaacaatgagtgtctacatattgcaagttatgccagaagctcacggctcattatcgtgacaaacaatgaaaaagcattcatctgggtagaggattaattgtagaaaattaggcagattaggccatttaaaagcaaacctacgaatagtcgttaaattgagaagtttccaggcaaagatacgatttgtcgttttaaatcgtttcctgcttaactattaaataaaaaacagctcattgaaactctcgccaaatgataatcacgctaatcctgctgaatggtggcaaacataaacaagattgactacaattgttattagcagcacactacgaatagtgtgttaaatcatacaccattcgaatactaaaactttgctttaataaatgtatacccaatggatttcaagatgcatcgcgacggcaagggagcgaatccccgggagcatagataactatgtgaccgaggtgagtgaatgcagccaacaaagaagcaacttgaaagatgacgggtataggtttgtacgttttcaaatgcgataccaaagagaacaacgcccattaatggcaccaaagcttttcttttaatggacaacttgtctttggatagttgatcgcttgtattgaagtaaacgatcctaaactgagttcgataaattccctcccctgaagaaagcaatctactacagggaaagggcttgaatgtttttagaaaacaggagaatcaaccatgtatatgtttttaccttttttactcgcattatttgcggttatcaccaccctatatggcaagtataaaacgagttataccctctggggccttctttcggtgacgactgtagcttggtttatccatcatgcaactgattcgttaaatctatctttttaacgggagacaatctgatgaatcaggtattagcaacaaaacaacagatcagcttcggcatgatatttaacctcatagggttatttgctatcagtgctgtcctaacccttgccttctattatcaattggtcctttcagaactcccttgtccattatgtttgctacagcgagcaggcatgatcatgatagggtttggtttcctgtttaatctgtgttttggtatcaaaagtgcgcactatggcttatcacttatcggctgtgtcgtgactggcattgttgcgatccgacaagtatttttacatatcacacccggtgatctcggttatggttccgcgctttttggtatacatttctacacttgggcccttatctgctcagtaatcgcgattatcggcatatccgtcatgctgatattgaaaagcctggaaaaaacaaccgaagaaaagcaaaaaacatctgccatcggtcagattattatcggattatttgtcatattaattaccgcaaatttaatctccactattttggagtgtggcggtgggcagtgtgatgacaacccaacgttctatcaattgctcggtaaataattcatttgttaaaaaaactcagggcgccattggcgccctaagcatgggtattgcaggaaagattatgcttctttactgcgatacgcacgacggcgttcgttttccgtcaaatggcgtttacgcagacgaatagacaccggggtcacttccaccagctcgtcatcatcaataaactccaaagcctgctccagggttttcttaatatgtggagacagggttgtcgcttcgtcagtaccagatgcacggacgttagtcagtttcttacctgtcagacagttaactgtcaggtcattagaacgagaatgaataccgatcacttgaccttcatacacttctgcaccatgaccaaggaataacttaccgcgctcctgtaagctgtaaagtgcataagcaactgctttaccctgaccattggaaatcatcacgccgttctgacggcgaccgatttcacccggacgaatatcatcatagtggctgaatgttgcatacagcagaccggtaccggaggtcatcgtcatgaactcagtacgaaagccaatcagaccacggcttggaataacataatcaagacgcacacgacctttaccgtctggtaacatatcgcgcagatccgctttacgctcacccaagccctgcatcacatctccctgatgctgctcttcaatatccagcgttacttgttcgaaaggttcttgcttacgaccatcgatctcacggaagataactttcggacgggataccgccagttcaaaaccttcacggcgcatgttctcaatcagaacagataagtgcaattcaccacggccagaaacacggaacgcatccggatcttcggtttcttcgacacgcagggcgacattgtgaaccaactctttctttagacgctcaaggatttgacgtgaggtgacatatttgccttcacgtccacagaaaggggaggtgttaacacagaaatacatgcttaccgtcggctcatcaacagccaagggtggcaatgcttcaacagcattagtatcacacagcgtatcggaaatattcagctcacccaagccggtaatcgcaacgatgtcgcccgcttccgcttgctcactctcaatacgctccagccccagatgacccagtaccttaccgattttgccgttccgggttttaccttcactatcaataattgtaacgttctggtttggcttaacagtaccgcgcttaatacggccaatcccgataacaccaacataattgttatagtccagctgagaaatctgcatctggaatgaaccattaaggtcaactttcggtggttctacatgatcgacaatcgcctgatacaacggcgtcatatcttccgccatatcttcatgatcagtaccggcaattcccatcaatgccgatgcatagataatggggaagtccagttgctcatcagtcgcacccagattgacaaacaggtcaaatacctgatccacaacccaatcagggcgtgcgccaggacggtcaactttgttaatgaccacaatcggtttcaaaccatgagcgaacgctttctgtgtcacaaaacgggtctgaggcattggcccgtccatagcatcgaccagcaagagtacgctgtcgaccatagacataacacgttctacttcaccgccgaaatcggcatgtcccggagtgtctacgatattaatacggtagtcattccatttaatggcggtattttttgcgagaatagtaattccacgctctttctccagatcattggagtccatcacacgctctgtcgttgtcgcacggtcaccgaaagtaccggattgttgcagcagcttgtcaaccagggtcgttttaccgtggtcaacgtgcgcgataatggcgatattacgcaatttttcgatcacaaactttgcctcaggcatttatagaaatggcgcgctattgtacacacattggtcgaaggactaaacaggatcacaataatctacgcttaacaacttgataacaatgaaattgtgatccctttcacacccataaatagacgcatttttgacataaacgcactaatattgtgcgcctcagtaatacaattgcaccaatatagtgcaattttcccaaatattcagatatcccatcaccggtatacccacgatacagtatattgcaaggcgttaaaaagttggcatgcttttcgcaaaagcttttcgtgattgaattgattttcacaactatttgactttcacaactataagtttgcaaacgtgtaatataaccttgttaaggtaaaacgatgtgattgtgttttctttagtcttaatcacgacaattttatcaagaccgacacaaaccaggagaaaccgagtatgtccgttgaacatgttttaaccatgattgaagagcatcaggtgaagtttattgatttgcgtttcactgataccaaaggcaaagaacaacatatgaccattcctgctcatcaggttaatgcagacttctttgaagatggcaaaatgtttgacggatcttcaatcagcggttggaaagggattaacgaatctgacatggtactgatgccagacccaagcacagccatgcttgatcccttctttgacgatgccacactgactctacgttgtgacattttggaaccaggcactatgcaaggctatgaccgtgatccccgttccatctccaagcgtgctgaaaacttcctacgttcaagcggcattgccgatactgtcctgtgcggaccagagcctgagtttttcctgtttgatgacgtgcgcttcagcagtgccatgtctcattcttactatcacatcgatgatatcgaagctgcatggaattccgggacgcagtacgaaggcggtaacaaaggccatcggcctgcggtaaaaggcggttatgctccgctgcctcctgttgattcttcgcaggatttacgttcagcgatgtgcctgacgatggaagagatggggttggttgtagaggctcaccatcatgaagtgggaacagcaggccaaaatgaaatcgccacccgctttaacaccatgaccaaaaaagcggacgaaacccaaatttacaaatacgtcgtacataatgtcgcgcacaattttggcaaaaccgcaacctttatgccaaaaccactggttggtgataatggttccggtatgcactgccatatgtctctgtctaaaaacggtactaacttgtttgctggtgacaaatacggcggtctatctgaactggcgctattctacattggcggtattatcaaacatgctcgtgcgctgaacgcgtttaccaacccgacaaccaactcttataaacgtttggttccgggctatgaagccccggtgatgctggcctactctgcccgtaaccgttcggcatctatccgtattccggttgttgccagcaccaaagctcgccgtattgaagtacgtttccctgatccggcggctaacccttatctggcattcgccgctcaattgatggctggccttgacggcatcatcaataaaatccatccgggtgatgcgatggataaaaacctgtatgacctaccaccggaagaagctaaagagatcccaactgtcgcctcttctctggatgaagcactggcagcactggatgccgaccgtgaattcttgactcgtggcggtgtattcaccgatgacgccattgatgcttatattgacttgaaaaacagtgaaatagagcgtgtccgtctgacaccacatccactggagtttgaactctattacagtgtgtaattagcagcaccgtttccgctgatcattttttgttgccgtgaaacctttagcccatcttcggatgggcccttttcctgctatccaaatttcaggctttgactgggttttacgctcgaacatgatacagtgcaccaaaaaagtgcaggagtgtggatgaaaacggaaaatctgcccgatagcgggcaaatattaaattcgctcattaacagtgtactggtactggatactgatctcgtcatccgctatgccaaccatgcagcactacaattattcgctcagagtgcccgtaaactattcggtacacctcttccagtactgttcagctatttttcactggatacagaactgatgcattctagtctggtcagcggccagagttttactgataacgaagtaacattagtggttgagaaccgctttcacattatgtcgctcagtgcccaaccgatttccgagcagttcatcttgctggaactggcacctatggatagtcaacgccggttaagccaagagcaggtacaacaagctcagcagacagccgcacgggaattggttcgggggctggcacatgaaatcaaaaacccccttggtgggttgagaggagccgcgcaattgctgtcaaaagcactgcctgatcctgctttgcaggaatacacccaggtgattattgaacaagccgaccgattgcgccatctggtagacagattgcttggcccacaacatccgggtgaacgaattaagcaaagcattcattatgttgctgaacgagtttcccagttagtctcgctggaaatgccggataacgtcacactggtaaaagattatgatcccagtttgccagaactggcccactatcctgatcaaattgaacaggtactactaaatatcacccgtaatgccttgcaagcgctaggaaaacaggggggaaccattaccctccgcactcgtactgcttttcagattaccttgcatggtaagcgctatcgtctggcggccagaattgacgtggaagataacgggccaggtatcccgccacaaattcaggataccttgttttacccaatggtcagtgcgcatgaaggcggaacaggtcttggtctatccattgctcgtaatttaatagaccaacactccggcaaaatagaatttaccagttggccggggcacacagcattttctatctacttacccattaagaaatagaggataacgatgcaacagggaaaaatttggatcgtcgatgatgacagttcaatccgctgggtactggaacgggcgttaagtaacgcggggatggaatgtaccagttttgccgacgcggatagcgccctgaccgcgctggcccaaaacacacctgatgtactgatttcggatatccgtatgccgggaatgaatgggctaaacctactgaataatatcaaacagagcaacccgttgctgccagtcatcattatgaccgcccattctgatctggatgctgcggtcaatgcttaccaacaaggcgcttttgattacttaccaaaaccctttgatattgatgaagccgtcgcattgctggaacgagcgcttagtcactcccgcgatcagaatcaatcaattaaaagtccacaggttgtcacacccgtttctgacatgataggagaagcgcctgccatgcaggacgtttaccgcattatcggccgcctctcccgttcctctatcagcgtcctaattaatggcgaatccggtaccggaaaagagctggtggctcatgcgctgcaccgtcacagccctcgggccaatgagccatttattgcccttaacatggcagctatccctaaagatttaattgagtcagagttgtttggtcatgaaaaaggggctttcactggcgctaatcaagtacgtcatgggcggtttgaacaggctaatcgtggctcactgtttctggatgaaattggtgatatgcctctggacattcagacccgtctgttacgggtattggcggaaggtcagttctaccgagttggcgggtatgctcccgtaaaagtggatgtgagaattatcgcggcaacccatcaggatctagagcgcttggtacagaaaggcaaattccgtgaagatctctatcaccgcctcaatgttattcgtatgcaattaccgcccttacgtgacagagtagaggatatccctcgcctgacccgccatttcctacaacagaccgcaaaagaattgggcgtagaaacaaagattctccatcctgacgcagaaatagccttaatgcgtttaccttggccgggcaatgttcgccagttggaaaatatctgccgctggctgacggtcatggcggcaagccaggaagtattagtgcaagatttgccatctgaattatttgaaactcatcataataccgaaagcggtatgacaacatctgtaaatacagtatctataaataccgtacccgcaaatacaacacctacaaatacaataccgaaaaattggtcgcagctacttgcccagtgggcaacaactgcattggaacatggtcagcaggatctgttatcggaagcattaccgttattggagcgtaccttacttgattgtgcactgaagcataccaaaggccataaacaagaggctgcacgattgctaggttggggacgcaatacgattacacggaagttaaaagaactcgggttggagtaaggatatattcgcaaatcaggctattgcctatttatggataccccaattttatggttgaaacagggctataatcgccccatttctatctctcttaccagtgctgatatatctacaccgtaatttattgacgtttccgactctggtccgcatgcctgctcaggaatccgttgatgttgatagtgggggttcttgctctgctgaaagcccttagtaaacagtatttcagctcgcaatgcttcaaaactgtaaccacgaccaacatggttcaccactctaatcaaattgttcagattctctatataagcattagtgatcgggtggtcgaagtaagcaaaaacatcatcatgccagttatctatagctttaacgagtgggtcaaaatacaccttcatttcaggtgttatctgtctaagccaaacatagtaggcttgctgtgcctcgtacctatttttgcagtcccatatgccgaaaaatgactctttcaactcgtaagcataacccaagtcgggatagttgagtatccagtcagagaatcgcatatattcagcatctgtctgctcatggcgacgtttcagcaacacaaagtgatttttcatcagtcttcgacgctgctgagctgtcaagccgcttctgatggcctttagtgctctttctagtgactcattcgccatacggacaacatgaaacttatctatgataaccgtagcgtcagggatcatagtagccactgcttctctgtatggtcgccacatattcatagcgacatagcgcacctgatagcgatcttttcgtttagttaggtagcgcataacagtggctttgttattgttatcaagcatatcaacaatggtttgcagctcgatattggcgataacacaccggggttttatgatatggatttcatcaatacccagccatttaggcatttcaaaattaaaggtcttttccagtctctcgcaggagtcgtgaaatatattacgaaccgtcttttcgtccacacctacgtcctctgctacgctggaaaaggtgcgccgtagactctcacgctcaatgtattggatcaaacggtgagtcatttgccgcttaccatccttgtgtggtactggttccataaacgtcttacaacatatttgacaacggtagcggcggcgattcagtataatccctgtccgcttgccattgacaggagtatccatgatcacctcatcacgacggccaaagccaacgatttcaggatgcttgcagtggatgcagtgagtaggtgggttggccgtccctacatgtacccggtaatcatgctccagttcggagacagacaggacgatataatcaggccagttaaggatgtttgccataatagccaacttatctttgtcagttattctacgagcgttacactccaggtgatcaaaacatcctccgcgaccgattttattcgcttgataattttctggcgttctgttttgtcgtgacactgatgagcctcttcaacaagctctgcaaggttagtatgcatcgtgttagtaatatcaaaattaggtaatgatagatgtttgaatacatccgcaacttgaatggatacattgtggctgttaatccattcctgaacagttaatgaattcaataatccgcacaaataatatgctgtttctttgttatcaaaggacgcaaagtatactttgtgatctggaatataaacacgttcaccaacaacaggtacattctgaaagcttgcaaccgctgcataaaacgatgaggacatttctggccatatcactttccatggtttgaaggtgtaatcgccaacattataaacagcatggtaaggagcgcctttcatttggcgacgataggtagaacgctccagtaacagtctctcgaaccctttaaaccatgctaaggtttttttcatcttaggggaattcaactgtacatccgcactctcgtactctgcatttgaaatacctgtgtttggtacgaacgtaaacagtctttgttcaacatcatcgtaatctggagcatcaagtttcaagtaacattcatcaaaatcactcgctcccttaattaaaggataaagcatattgggctctacccactgagttttctgtggcccaatgtctttccgtccagcctccgggcggctttgaatctgaacgagagcgccgttgttttgcaagattggaacaaaataaactccgttaagatccgtggtgatccctttccgtcctttagtccatttacacggtgatgatagatatttaatcgcgttgaagcgcccaggagcaagaattgcccacggagaaccttcatcaccaaccggaaatgcttcttttgtcgtatgagaaatagctttcagcacgtcatcaagaggtgtgcagggcctaatagctttcctgtgaccaggattagctgaccataccttgtaagccacggggtattgtacagagacgatggattttcgaaacagagcaacagacgtgtgattgcttgcatcttcaaatggtttcaattccttcatgtcatcaacagacaatggttgaagataaagagaatcctctcgctgtgaatctaatttaaatgttctaaaacctgctgacgatgggttcttaaaaagtgtgccagtgatgacaaacgctagtttgccacctatatccagccatttgtcggagactgtgtaggttatcatggcagatatatcaagttcattcccaccatgacgcttggtcttagaaaaaataccatagtcttcacacgttggtttaacacgttcacgataaaggtcaggtagctttgaccatctaacccaaggaggattgccaataactaaatcaaatttacctgctgccgctgaccagaagaagttcctgacaatccggaaccaaataccgttccattgctttctgtgtagatttaacacttgatcataggtgtgtcggagtggcttgtaccagtttaataactcttcttgggtgactatacttgctgctatcagtttttgactggatttatcaaactctaatccctgcacaacgtctttgcccattcgttcaaaaacaaaatcgagacgttccctgtttaaggctaactcaacaggcaagtgaatattcagtttggctacctgacttccgatgttgtattcaacaactctattttttccagaggggatctccgcaggtgaataaatggcatcagccattagtacaggaacctcaatatccattcctgggcatgcagcgagaaggtctgcaatttccatcaggaaatttacacgagcagtctgaacagcaagcgggttcaaatcaaaaccccatacactatcacataggtttttgatgaccttagacacactccatccttgtattgccgccagctcacgctttttacggatcaccgccagtaagaatgccccagatccacaggtaggatctaacacacgctgctccaataatgtgtcgtcagcagctctctgaagcgtaaaatcaactaaccaatctggggtgtagaattcaccaaggctctgccggagtttgccaggaacaagaccttggtatagatctcgcaaaacatcccttgtcctagataaatgatcaagccgatataacgatagaaccgaaagcaaccgcctcaaggaaggtagtaacgccggaacaaccttgtttctagcaaggccaatataccagctaaaaatagcctcttcgacaaaaccgttaatgcccgcttccctgaaaatggccgatttctcgacagagtagtccaaataattaaccagctcatcatcatctttttgcgccgacatactctgagcaggttgagtcgatgatgttaatccgtgtgctgatacaatctcggcagctaacagtttgatgagaatcgaattgtaagtatgaatgacaaatagccgtgcggatgtagaatcttccggccaaccattccagataaatgcaatctctttgttaatagcctctgtttgtgaaatcgacatatcagcaacttggccgtacaaagttctccactcctcaaaaagcattttaactttgttgttgccttgctgttttaagtagtaaagcaaaccatcagacatagcttgcataaattcacgggcatttgctgacccatgtccaaaatcggctaataggttctcagttgttaaggcttttcgcgtatcggagacaaaagcgtcaatcaccaaatcgaccgcataggttgaaaagggaatcaagtgttgagtatgaatctgatcaccatggacctgagcaaaacaaatgtgctcaccgtcaatagctattccaatgaaatcagattcgggaattcctgttttcgttgactcacactgtatatatggcagaagtcgttcttctatggcatttttgaagccagcgctctccttcttgccacgaaacaaacccggcgctttgaattcaatgattacgtgattatggcttgagtctttacgcccgcgcttagcattcaaatgaaatccagtagcatcttctatcgccttcatccaaatgtatcgaacttcctcttcacctttccaaggctttaggcgcttttcctgaatagcttcgtatgcctcttggcccattacgtaccaccttataaaccggtgtaaaaattttcccaattatgaacctgaacaataatagcatcaaccgtataatccgattttaaaaaatttaaccagataaggctgaccaatacagaatgccgtgtcaacaattcggcaagttagggatcgtcataactgattgactggctgtattttatctgataaaaccagtatcaaacgtgattaatttacgatcaatcgagataatagaatcgacaaaaggcaagattgagcagtatctatcaccctccaattgaaaacgacaattttgtccaagtgaacagagcgtatctaaaagaatagcgcttcttgataaggagaaactcagtaacctcagaaatcctgatatacctaattgagaatgtaggacacacaaccaacgcaggaacatgtagcgatttaactctgaccgaatatggaggtatcttgagcgtctgtaacgcgcagtaaaaatactcaaagaagatcgctggattgaggttgtaaggctcggccatatgacaacatattgcgtcaatgcaagcgtattctggcaagcagcctgaaactcgaaaaaatacgcaatatttcaagctaccgttattaccttaccaagtgagcaagaacttaatttaaaaaaatcacaatctctgttgtgatttatattcaaactagtaattaaaaggttggtttaagatgatgaagtggtgccggattattgtggcgattattctgttttattctcttttcgttggtatgatacaagtgttatcgatcaatttttatattttccatgattactttggattgtggaagattccagccaaagtggccgctgttatcgcatctctttacgttttttgtctacttgttaagtttttgcctcttattattgctatttttatatgtagcttagttttggtggtaaatgtatggcattggtcattgtggacttcaatccttattcttatttggccggttattgttgtcttggtttattgcgtactcaccaaaagcctgaaatataatacatcagacttttaggaatcagcaggtcagcgaagaagaagttgctcgcgtacttgcacatatgatggatgattgaatttatatatgaaaaataaaatatttagcaaaaggtggttcaaaaatcttttttatgtatttattaaagaattattgtggtcaaatatgcccgttatagccatttttatatgtgggattgtatcagtgtatttcttccccgatgaatggtggattgcatctttaataggaagtattgtaattgtcgttctatttcttgttcttacatatttaagtgaaagaaaaaaaagctaagcatatacgcttagctcagaccgctgacaaacctcgttgaaaataacgtttttttctttgagactgtaatttaaattgtgtaattgccattttatttaaacagatattaggtaaatgaggttaaatgaaaaccgtaaaaccggatattcaaatgtaaaataaaaagactttaacgaggttaaaacctttttatttaaaaaccatgctctgaacaatcaaatcacccttgaaaactgatgctggcgaacctgttggcgcaaataaatatcaaaacacatacagatattacgaatcagtaaccggcctcgcggcgttacccagatctgtttctcattcacttcaaccagtccatcgtcaaccagtggcgttaataattgcaaatcttcggcgaaatagcgggtaaaactcagctcatattgctgctcaatatcgataaaatttagacgaaaattacagattagcgctttaataacatcacgacgaatacaatcatcttgggacagcgttaaaccacgccataaagcatgctcctgtttttctaattccgcataataggtttttaactctttttgattttgagaatagctatcgcccaacatactgatagcagaaactcccaagcctagcaggtcacactcttcctgagtggtataaccctgaaaattgcgatgtaatttcccttcccgctgagccaccgccagttcgtcatccgggcgagcaaaatggtccatgccgataaattgatagccattacttgtcagcgttgcgattgtttcttgcaatatatccagcttttgttcagcactcggtaaatcatgttccttaattttacgttgagcagcaaataaactcggcaaatgagcataattgaaaacactcattctatccggtgataacgctaatactcgttccagagtgaaagcaaaactttctggtgtctgtttcggcaagccataaatcagatcaatactggtggaattaaaacccgtttcgcgggcacgagctaccaaagcaaagataaactcttcatcctgttcacggttcaccaaatgctgtacttctttattgaaatcctgcacgcccatgctcagacggttaaaaccttcactacgcaggtgatcaatcatatccagttcaatttcacgtgggtcaatttcaatagaaatttcagcatctggcagaaaatcaaaatggtgacgcaacaatcccatcaatttactgatttggtttttattaagataagttggcgtaccaccgccccaatgcatctgactcactttacgaccagaaaacaactttgcccggccacgaatttcccgttcaagccattgcaaatattcatccgccttatgctttcgacgagtgaccaatttattacaaccacagaaataacagagcttatggcaaaacggaatatggaggtagagagaaagcggtcgttcagggtaacgggcagcagcctggataaatgctgcattatcatactgttgattgaattccaatgccgtcggatacgaagtataacgagggccggaataattgtatttctggatcaaaggcagatcccaaacgatggcttgctcagacatgctcattccttccgatgtttttgcccatcaaaacgtaacactttcatatgcttaatatgttgcgctatggtggctccgcgcagccgggttttacgccgcgataatcgccacagtttacccaataaccataacaaataacatactattagtatggttattaggatcaacccgcctctgatcatgagagattaaattagttacctttcagcagttgcataatgtcatcctgcttctcttcttcacgctcttcctcatccagtttaatacctaactcttccatcagagcgtcaatccgatccagcgtagtgtcaacataagcatgctcttctttagacagactttcgccattttccagacgctctaacaatgcatccagacgatcgtcgttttccaacattgctaactcttcctgtggcgacagacgtggttttgtctcgactttattagcaacgacaggttttgtcggttgttccccgacgatcagcggaacaggcactttactaccaagacgtggatcacgttgctgtttgcctgacggatgtttatcaccgctctgttcctgattgcggttaccgggcggattgccacgatgttttttctcacgcttacgtgcacgcccttccgcattcaattcttcgcggttttttcttttctgtttactagcggatactttggctggtgcttttttctttaacgggttcatagcctgttactcagtttggtttatcagggtattgctgcgccggaatctagcagaaactgcacgtatagaaaagcgccgtgaataactctttatcttttaaaaaaaatagccaaaaatctcttatcattcatgcatggtttaaccatcaacaaatattctattactcttagctttcaataaatgataaatcgatatgcctatttttgatacttcttgctataaatccgtttacttgtgggtagttggttatgctttgttatggatgatagtgagttattcattcgacccaaccgtcccttatgatgccgtcgaagcattgaactggggaaaaaacggcgaatggggttcacctaaaaatccgtggttagtgggtgtaatgatgctgcctgctatccatataagcggtgtttcattgagtttttactggtatttcattcactttattgctatcgcgattagcatgctcggtgtatggcatctggcatttcgactgacaggaaaaaaagagctggcatggctcgccatgctgacattgaatctgtctggtattattaacttcgatattatcccatataacgataattatctgctaattatgctctggccgtggattatgttgttctttctacgagccgtatatgacaatccacattggtggttggcgtttgcccttagttccgggctggcaacaatgggaaaatattccacattggcattggttggttcagtttttctattgaccctgtttgtacctaaaattcgccaatgttaccgccaacccgcgctttatctcgcactggttatctggtttgtgctggtcctgcctaacttctggtggctgtggaataatgattttgccgccttcaaatgggtaaattcacaaatagatagcgggtttaatttacagaccacccgatcgttattatcagtattttatccactgattatcgttggcattattatttatcagcttggcggccgtattagctggccgaaagagcaaccgaaccgattggtaaacattatcatcttgttgccattactgattatctactgctggttctcattcaatcaaggcggaagaatgacagaatggctgcacccctttatgtctgtttcatcagcgctgttggtcggttctattacccgatttccacaaaaatcattacgcagcactttgagagggttgattgtcgttgcggtattgattttgatgggatatgtactgattatggcagccaatgttcgcggtgccggccataaattcgaaggtattaaagacttttcttggcaactggaacaacgctggcatcaacactattcgacaccgctccattatgtcgggggcgaatacttacatcagtggctgactgtctacgcgccaagtcagccagagactatccaaccttggataccgggaaagcaggcacccaatatctacaaccgccatgttaaagcaagcgatattgtacgtagcggtgctattttggtaggcgaaaaaggtaaaacttgtgaacaggaagattttcacagcgttctgcaatactggccaaaattaagaataagtagcacggaggaattccttttccagcctgaacctgaaactaagccaatattggtttgtgtaggttttgtgtcaccggagaaatatcaatagctttctctgcaagttgaaagccgatttaaccggctttcaacatttcatacgctattagccaatagaccggctaacttagcatcatcctgcatgatgacttgtacatttccattacgtagcgcagctgtcagataatactcgcgcagatactgcacgattgcttggttgggaacgcaatactattacacagaagttaaaagaacccgggttggagtaaggagataatatctccatccctatcaccactttgcggagtttaatatatcagattccccattagcaggattaaataaccgatctcgatcacatttcatactattcattcagacaagaaaataatccctcattagaatagtttattaatgttattattaaactatcaagattatttatgggaagccgttttctttatcaccgacgcctgacagggcttatcctgctgacaatctccgaactggtctatgcttcaacatcgatcagccctgcggatcaagaaaccatcacgcaacaacaaaaagcattgttgcaacaagccgagcagcaacgggaaacgctgcgcaacaacatcaccttatctccatcccctgatgtagcgccgggtacagcagaatctatctgccacaccattcaccggattgaatttgacggtgccaaaagcctgcctctaccgatcaaacagcacttaatacacccttatttatcccactgcttatctttgcaggacattaatacattggtacgacaaaccactaatgcctatattgaacggggttatgtcacttcccgggccggactcaacgcacaggatttatcctccggtattctcattattacggtcaatgaaggcaaagttgaatccgtcagtctggacggagaaacacctctctcgttgaaaatggtttttccgagcatagtgggtaaaacgcttaacctgcgagatattgaacaaggcatggaacgtttgaaccgcctgccttcccaacaaatgaccattgatattcagccgggcaaacaaccgggttattccacggttatcttaaaacgaacgtcgattcgcttacccgttagtgccagtttgggggctgataatagtggtcaaaaaagtaccggcaccgagcaaatcaatgccagcataaatttggataatccattacaccttgctgaccagtggtcattatctgccagccgcaacagtgacttccgcaatagccatcaaagccgtagcctctccgccaatgtgacggttccttacggttactggttattcagttatcaatatgcatggaatgactcttttcagaatatcccggcatgttcacaaacctatcgctacacaggtgacagccagactcaccggctggcagtaaaccggacgttatatcgtgatggagagcagaagctggcattggatatggggctgacacgccgtcgaaccaccaatttactggcgggagagacattatccatcagcagcccgacactgagcaccatcaacctcggcgttaattacagcaccgtgctggcggggagctatgtcacctttaacccgatggtcagccacggtttacaaacatttggtgccaccaaagatgatccgcgtttctccgatgcgccgcgtagtcaatttcgcaaactcagtctgagcgccagctatttcatgcctgtcacagactccgtttattacctctcatcgatttacggccagaccacgccagacaacctttacgccagcgaacgtctctcactggggggacaatattccgttcggggattcaaagagcaatatctcaccggcaaccgcggcggatattggcgcaacgagctgaactggcggatatcagaactgcctatcccaagcgagctcactttaaccggagcgctggatactggctggttacaggaaaaaaccggacaaatcgagggcggcaatgtcaccggtacggctctgggcttatcactgactcaccctagattcaaccagaccatcactattgggaaacccctcattcaccctgatcacctaaaaccggatcactgggtcgcttattggtcagtatcactgactttttaacacttaaattaaacaaaagggatagtacgatgagtaaacgcaacaactcggtggcgagaggcacgagttatcttttaatttacctgacggcaattcagccgctacacccggcgattgctgcggggatcacaccggacaataaccatacgcaggtacaaaaccaaagcaacgttccggttgtcaatattgccacgccgaatgacgcggggatatcccacaacacctataaagcgttcaatgtcgatactcaaggcgctgtactcaataacgccacgcaagcggctcaatcacaactggcggggcaacttaacgctaaccctaatctgcatggaaaagcggcggaactgattattaatgaagtgaccggcagcggacaatctaacctgcaaggccaattggagattttcggcaataaagccaatgtaatgattgccaaccccaacggcattacttgtgatggctgtggctttattaatacttcgagtgcaacactgaccacgggtaaaccgcaatttgataaacagggtgcgttggaagcattggaagttaaaacaggccaaatcaccattggcggtaaagggttagatggcaaggcgacggattatgtcgatattatcagccgggcaacggaattaaatggaaaaattcaggccaataacctgtctctgacacaaggcgctaaccgaatcagtttaaaagacggcacagttaaacctgtcgctggtgaaggcgctaaaccccaattagccgttgataccaaagcattaggtggcatgtatgccaataaaatccgactggttgccactgaagagggcgttggtgttaatctgaaaaatttaatcagtgaccagcgtgatattactttaaacgccaatggcaaaattgaactgggcaatattaaggctaaaacggacctgaatgttattggcaaagaaacccatattgcgcccaatattaacgtgcaggcgggacgggatattattctggaaaataccacgctggataataaaggaagcgtgactgctggccgggatattcgaatatttggcgataccgtgcgaaataacggtgataaagcacttctgcaagccaataataatatgtggatacagaaagatgctcaggggaataaaggtcatctgattgagaataaatctgcgacgataaagacggtaaagggggatttggttgtcaggacccaaaaacttaataatacacgtgatgtttttgttgttaaaaacaaggagttaataccagattcaacagataaaaacctgattattaatgaaacgaaaacctgtgattttggagacccggttattcatgaagctgcattaatcactccacttcctgataaatggtttgggcgtgttgattttggtagagataatactacagatgggggaattcatataaatcacgccagaactgaaaccatcaattctgacagtaagcaacctggagtgatagcatctggaaagagcatttatatcaacagtgatgagttattgaattttgtcagtaagatgagtgccggaaaagatattttcttaacaggaattaattttattaatgaaagcaaaataaccggcgtgctaaataattatattgtatatactgagaaggaaaccgaaggtagtgtgtcttcccgtggcgacgtatatatcaggacagactttgacagatcaggaaacgttaaaacatgggaggatgaaagcaatattattgaacccgccagtgttgttgctgccggtaatcttgtcgctgattttaaagataatattaatattcgcacaccacccccttatgacatcaatgaaatgtcccaaatcaccgttgcagggggttatgatgcgttatctgctaaaaatattgtcttaaattcagggaaaatcaacaacaataatattatcaaagctaataacaacatcacgattttagcaactgacgctgttacattaaacaccggggaagttatttcgggtggtgatgtatccatgatcgccgctaataatattgatgtattgcagagtaaaatcaagggaaaaaacattactgttattagccgtaatgctgatttgaaattgcaaagcaatgagactgtcggatatttcaaccatgatggtaatagaataatcagccgcattgaggcaacaggtgatttattgctaaacgcaggtaagaatattatttttcgggacatatttttaactaaaagtgataatattactttaacggcaaataatgatatcaccattgataataacaatgcggtgctattatcacataaacgaattggcagtattatctctttcattaaagaacaagaactttttaataacatgttatctaaagtgggtaagctggatgcaaaaagttctattgtgattaatgccggtggaaatttatcggctaagagtattcgtttctccgcagaaaaagacatcaatttaacttctgcaaaaagtattgatctggctccccgtgaattatctccttcactgagtaaattattcccttcatcacgttcaggagaattaagcagccaattaaccgcagggaataatatcagtgtcatcagcggtacagatattaacggaaaggcggttcagatacaggcaaacggtaacgtattattgtcctctggaaggaatatcacactcctgcccctgctttactctgctattgcttacaatgacgatgacagacctgagcattatgatgaacataaagatgacagaaattatggcacacaaatccgtggtactaaaaagctgacaatggctgccaatggagccattaccactgtgggttcaaagttactttctgatggtgatataacgattacctctggtggtgatatacgtttcgaatcggctcggaatcacttctacaaagatcgcgctgattatttcaaagataacagcatcacagaaacctatactcaacaaagtactgaattaaccagtggtggtgtgctaaccgtgctttcaaacggcagtattctttttcaggccactaaactggcggccaaaggggcaatggatatcgcggcgaaaggtggctatctgtacgctcaggcgatggaagaatctaaccattatgagaacacagagacaagtcgtaattggtatggcaggaagaaaaccgctaaacgtacccgtcatgatgtcactaataaagtcactgaatttaccgcgggtggtgatattaatctgttaagtcgggatgacagcacttacgaagccagtcaaattgccactaataaaaacgccaaattgaccagcactcacggtaaagtcaattttaaagcggtaaaaaataccgcttttgaacagactattacctattccaaaggcttttatattaagcaaagggataaaggttataccgaagataagtgggttcttccctctattcatattggcggaaaactgaccgtagaagcggctaaaggtgtcagcgcggatatcaaagcgaaaaatggtcagtcattacaaaatgtcctgactgtattggggaatacaccggagaccgcctggctgaaaggactcaacgaaaataaagatacccagtggaatgtggtgaaggatgcttatgacagttgggatcacaaaagccagcatttaaacccggtggtttctgcggtgattgcgattgcggcagcggcagcaaccgcaggcagttctctggcggcatctgtcgcatcttatgcgggtaatagcgttgcgggtggggcattaaccgcaggaatgtcatcactgacggcacaggcggcggttgctattgtggataatcagggtgatctatccaaagcactaaaagtgttgggtagcagcgataccgttaaatcaaccgttacctcaatggcgcttggtggcgcactggcgggttttgataacgtcatgggatgggataaagccgccaatggcgctcaaattgacccggcaaaagcgacattacctaaactgagccatggcgactggagcaaagtggctcaacgggtagcgggtcaatccattatcagttccagccttggtacagccatcaatggcggtagttttaaggacaattttactaccgcattacttgccaatattggcagccagattaacgccgaaggtgccgggttgattggggctaacggtcaggtgttagatttacccggaaaagctatcagccatgcggcggtttctgctcttgctgcggaaattggcggcggtgatgccaaaggggcggcggctggagcattagccgcagaactggccgcgataacattggataaaacattcaatgatccaatgaaaattcaggcaggtggcaaaatcattggcagcgtcgcaggggccattgcgaccaacagcgccaaaggggctaacagtggagctaatgccggggaaattgttattctctttaaccacctgaactccatgaatgcctacaatctggtcagagaactccaggaagccaataagcaaggaacgcctaccgaagcaatctggaacaaatacaacaaactgagcgctacacaacgggcagaaatgttgtctcactgtgccgggaacggtgggttatgcacactgacctatcaggctgaaatggaaggaggaataaaaacagcggatgccatcagtggtctgagatggatgtttggcttatcagaagaagattcccatcgtatcagtcagtttgtgacgacagaaaaccagaacgatttagggctgttgtataactcgttgccagcttgggaaaaaggtgcactgatagccaaagaggcggtagaatctgccggtattggtggtgccatcggcggtaaagcttcggttgcttcgattgttgggaaacacagaggaagcgcaataccagtactggagccaatagtcgcttctaatgggctaacttacaaatcaaaccctaaacacactcttggtcagcaaggtaatcgacccaatgcaggaattgaacctaagggctcggtggatttatttagtcattctatttcttctgcttctaaagaaaagcaaagatattccattgattctgaaaaaaatgttcatcgcttttcttacagtaatgatggtacatggcattggtctggtagtactggagatcaaaaaaatccattagacagacaagaaattcctaatgatgtaaagaaaaattttggtttacctggtaaatggagatagaaattatgatttttggtgatccatatcgttttgcgatattagtagaatatattccctattggagtgatagttcatttaaaaatgggttattccatttttatattaatgggaaaatgttccctgatgaactaactaccgcaacattaaatgtggatgttttttctttagatgaaaaaaatgcattagtttcttttcctgaaaataaagagctatttgataaagaaattaaagaagcatttaacacgatgttaggtatgatatctcctaatctggtagatagtaacctagatgtgccagaagattttgaatcgtcatatatttataaagcttcaacagagaatattgatgattttggtagttctgtatttgctgtatcttacgatgatattgttagaatcatcggagcaaaacgacgtatcttaagatatgataataatggttgtggttactgggaagatattcctaaacctgatttctatgaaacaaaaatttataaagatgaagttaaagaaataatttccaatataaaaaaatattatatatcattgtaatatagtctccatatataaccccaactacagttggggttatttggaatggcagctccggagatattaacaatgccttaacaagcaaacaggtgccaagtgatattcagaaaaatctaggagtgaaactaaaatgatttatggtgatccatttttattttctcttcaatttgacattgttgatgttttcgaattaagaacaacaattgacttttactcaaatatgaaaatagatgagttggcatgtaatgatattccctttgatcctattaccttatacagaaatgcagaaagttattttacaggagaaggagaagatcttattgatggcttgtttgatatgacctgtactgcaatgggggataatggctattatatttactttatgaaaacaagccaaaatgattgcctaatttgaagtgttgatgatgggaatacaataaaggagacattattacctgctggtacagttcattctgtaattcaaaaaatgtcacaatgcccattaactgaaatatttactagtaacaagaaaataacaatgaagcaaaaattatttggtcaaccatatgatgaaagtaatcctgagtggattctgaaaggttattttgatgtgatgtaccaaaaggggaaaaattatttttatgatgttatagaaaatattataaaaagacatggtttttctacagatggtgcctactgtaattttccagatatgaatagtttttttgaagaagaacattttgaaggggttgagtttacatggggctatccaccagaacaagcaccaacaataattgtaagcgaagcaacctgtttcaaatatgtaaaactagcctgtgagaaatatcttcaattacatccagaagatacagagcaagtaaaatccttacttgttcaactcccttaaatcagaatgatcctagcattgaatgctaggatctttctcagtcggttgattaaacacacattcaagcaagccctgagtgttttcagggccgggaatcgacatattcatgagttatctgttccaaaaaattgcgaaattttcgatctttcgtataacagacagagaacggagaacggagaacggagaacggagaacaaaagacagagaatataagtatatcaagtcagaagaaagatcagagttatcgtaatattttacttattttaaaggctaattaccatcatattatctaaaaagattatttattctgttattttaatattctttccttattctcataaagttgctaattaaaattaaaaatccccctatcgttaaaatagggagattatgccttagataaagataattaagtaaagagaaaaactaatattggggagccaaaactaatttttctttccgccagaaacggaaaaacgatattttcctacgctgtagagtaaatcggcgaacaagatagtttgctgtcaattccaatgccaaacacatcacgaaataaattaacgcgacaaataaaaagacttctgtcgggtaaaccatgctgcggttattaacctgagttgccagaaatgataattccgccacgccaacaatataagccagagaggtatcttttatcagcgcaatccactgattaataaaggaaggcaccatcatacgcaacgcttgtggcaatacaatgtaccaaagtacctgccaacggttaaaacctaatgatagccctgcttgccactgaccggctccaatcgcaataatccccgcttttaccccatgagccaaataagccgatgtgatcaacgccagagcgcaaaccaccgtggtaatttctggaatttccatacccagcatcaccggcaacaggaagtaagtccagaaaatcagcataatgactggaattgcacggaaaaagcccaataccgcagctaacaggttaacccaaaatcctttcagcattgccaaagcaataccggcaactgtacccaatacaatagaaatcgtcccggctatcaggctaataaccaatgtcaacgccgccccttcaagaggaccatcaggaaatgtacctaacagtagatagcgccagttttctgcaatgaccgaaaaatccattctaatgtcctctcgttatagcttgttgttgacgccattgtccccaaccttccatgacggcaatggtggcgatatacaacaccgttgcaacaccgaatgcttcaaacgtttttaatgtttcggtttctacttgacgggaagcatatgacaactcagccacgccaattgccattgtcagtgacgagtttttcacaatattcatatattgccctagcaatggcggcgttgcgattttcaacgcttgtggcaataccacataacgcattgcttgccagccagtgagtcccagtgcatgagctgcatatttttgcccgcgccctataccctgaataccggcgcgtagctcttccgccacgaatggcgctgaatagagagtcaaaccaataaatccagccaaaaattcgaatgaaggccaggccaatgatagacctaacagattgatttcatggggtgtattcagccaaaacatcacctcttgcggcagtatctgccctgaggcgaaataccagaaaaacagttgcaccagcaaaggcgtattgcgaaatagcgtggtgtaagcggttaccagccaacggagaattttcaattggctgtcacgagcagcagccagtacaaaccctagcaaggtggaagcgataacggtacaagcggatatccacaatgtaatcaggaaaccttgccaaagccatcccaaatattggggagcaagtaactgttctgtaacaaataattcaaacatatcttactattaccaggtattaccaatgacaaagccccgcaacaaaaggcgaggctaaaattatcaataacttactactcattaagactgagtttgctgctccaaaggcgcaaacttaaagtcacctctcggttgagccgatttggtttccgggccaaaccaacggttataaatttccgctgcttcaccctctttttccaatttcagcaaagtttggttcaccgcctcaaccaagcgctcttgtcctttcgccgcagcgactgcctgatattcacgggtgatgctaaaaggagagatctcaaattcagctttttgggcttccggtacattagccaacagaccgactaacttagcatcatcctgcgtgatggcttgcacattgccgttacgtagcgcagcaaaggccagaggtgtgtcgtcataagagatcactttggctgtcgggtaatgctcgcgcagcgtaatttcctgtactgtgcctttatcagcaccaatacgtaagtttttaatgtcttcgggcgattttaaaatacctttacgggcaataaatttttgcccagtagcaaagtaagggattgaaaaatcaacttgtttagcacgctcatgagtgacggtaaagttggcagcaatcaagtcaactttctttgatgccaacagaggtaaacggtttgctgggttagtcgggcgcagttccaatttaacacccaagtcattggcaatcgcgtttgcgatatctacatcataacctgccagttttttggtttgcgggtcaataaaaccaaacggaggattactgtcgaaaacagcgatccgcacggcaccggtttttttaatatcatccagtttatccgccttcgcagcaccagtaaccagtgttaacccggccaataacgccgtaataacaacgcgagatttcattaaactctcctgacaacaattaattctttattaatcacaagctatcaatttcactatagtgcatgaaataatataaataactatatttataactatcagcaattataagataaaaaaaatgccggtaaaaataccagcattcagactattgaccaagtggtcagcgagctattcgttatcttttgtcaacagcttttccagttcatcaccacctacatgccggaaatcctgccctttaacatagtagaaaatgaattcacagatgttttgacaacgatcgccaatgcgttcgatagaacgggcacaaagcaggacggtcagtacactggggatggttcgaggatcttccatcatataagtcatcaactggcggacaataccttcatactctttatccacctttttatcttcgtgatagatacgaatcgcttcttccagatccatgcgggcaaaggcatctaacacatcatgcagcatctggatggtatggcggcccagggattccaagctaaccaacaggggttgatgctgatgtgagaatttctcaagtgccgtctggcaaattttatttgcgacatcaccaattctttccagttcagcaattgttttcgaaattgacataatcagccgcagatcactggccgttggctgacgcttagctatgatgcgaacacacgcctcatcaatagccacttccatcatattgaccttatggtcatcctcaatcacttcacgcgccaatgcagcatcctgattatgcatcgcggtaatggctttagagagttgttcctccaccagcccacccattgccatcagttcagtacggacatgtgccagctcagcgttaaactgaccagaaatatgtttgttgagattcagattgtccatgttacgccccataatcaaccataacgaccggtaatatagtcttcagtttgtttcattttcggtgtggtaaacaatgtgtctgtatcactgaattcaattaattcaccaaggtacataaacgcagtgtggtctgaacaacgcgcagcctgctgcatattatgagtcacaatcaccacggtatattcagatttcaattcgctgatcaactcttcaattcgaccggtagaaatcgggtcaagggctgagcaaggttcatccaatagcaaaacttctggccggatcgcaatgccacgcgcaatacacaaacgttgttgttgcccaccagatagactgtatccgctctgatatagcttatcccgggtttcactccataaagccgctttcgtcaaagcccactgaacacgttcatccatttctgctctggagagtttttcaaacagacggacaccaaacgcgatattgtcgtaaatagacattggaaatggcgttggtttttggaataccatgccaacgttggctcgtagcagcgccacatcctgtttatcagtcaggatattcttaccatccagcagaattttaccttccgcccgctgttcaccatacagttcatacattttgttgaaagttcgtagtaacgtagacttaccgcaacccgacggaccgataaaagcagttactttattctttgcaatattcaacgttatgtttttcagcgcgtgaaatttgccatagtaaaagttcagattgtggacctgaattttgctgctagcgatatcattaactatgttcatttacttctctctgttgaaaatatcggtcagtgctttttcttggcaaacagcacacgcgccacaatgttaatcagcaatacacacagggtgatcaataatacgccggcccacgccagttgctgccattcggagaatggactcatagcaaatttaaagatggtgaccggtaagttagcaattggctggctcaggtcagtactccagaactgattggaaagagaggtgaacagcaatggcgctgtttccccagcaattcgagcaatcgccagcagcacaccggtgataatgccggataccgatgctttcagcgtgatggctgaaatcatcttccatttcggtgtacctaaggcataagcggcttcgcgcaggctatcaggaaccagttttaacatgttttctgtggtcctgatcacaatcggcacctgtaacaacgccaaagcaatcacccccgcccaaccggaaaaatgctgcatttttgtcacaacgaccatgtaaacaaataaaccgacaacaatagaaggggctgacagcaagatatcgtttataaagcggatcacctctgccagccatgaccggcggccatattccgccaaatagatacccgccatgatccccagaggcgtaccgataactgtcgcccacaggatcagtaatccactgcccacaatggcatttgccaaaccaccaccttccgtattcggtggcggtgtcatttcggtgaacaacgccagtgacatgccgtcgaaacctttggtgacggtagaaaacagaatccacaccaaccaaaacagaccaaacaacatggtcgccattgataacagcagagcgatgcgatttttttgacggcgccatgcctgtttacagctacgtacattagcatcaataggcttttgtctgtctatcgttgccatatcagcgcccctcattcttcgccaagcgcataatcatcaattttgataacgccagcacaataaaggtgatcacaaatagaatcagaccaagctccatcaatgctgcggtatgcaagccagattctgcttccgcgaattcgttcgctagcgcagaagtgatgctgttacccggcataaacagtgagaaactatcgagctggtaggtgttaccgatgataaaagtcaccgccatcgtttcccccaacgcacgaccaaggcccaacatgacaccaccaatcacgccatttcgggtgtaaggcaacacgatatgccagataacctcccaagtggtacaaccgataccataagccgattctttcatcatcaccggtgtttgttcgaaaacgtcacgcatcaccgaagtgatataagggataatcatgatagcgagaataacacccgccgccagaataccgataccaaaggcagggccggagaacaattcgcccacaatcggcatactggcgaggagattgccggcgggctgctggaaataggtggcaaatagcggcgcaaaaacaaacaacccccacatgccatacacaatacttgggatagcggccagtaactcaatggcgataccgagcggacgtttcagccagttaggtgccagttctgttagaaacaaagcaatcccaaaactaacaggcactgcgataatcagcgcaattagcgaagtaaccaatgtaccgtaaatcggtatcaaggccccaaattgctctgccggggcatcccacgttttctgccagaggaaagagatgccgaactgctgaatactaggccaggaggcaataatcagcgagataatgatgcctcctaacaaaaataaagttatcagcgcagctagcctaaccagtgcgctgaaaataatatcgccatttttactgggtgctttcattgccgttttttgttcggccatagagcttattctcattcggggttaactccccccttaaacggggaagaaattaaaacgacaaatttaatcgatatttaaagcaatcgatatttaaaacaatcgatatttaaaacagtcactatcaacacgacttaatacagggccttgccattgctatcttttatctgggttttccaagccgcacgaacttgctcaatcacctctttaggcagagttgcataatccagatcgtttgcctgtttactgcctttctcataagcccagtcaaagaatttcaatatttctgcccctttcactgcatctttttgctgttgatgaaccagaacaaatgtagtggaagtcatcggccacacattttcaccttgctggtttgtcaaatcctgagcaaacgttttatgccattctgctttcttcgctgcggcactgaaactctcttctgtcgggctaacaatgttgccattagcagataccaatttggtataagccagatgattctgtttagcgtaagcatattcaacataaccaatggaacccgtcagacgttgaacaaatgcggcaatcccatcattacctttaccacccaaaccaataggccagcttacggtggaacccacgccaactttttcttgccacgctttattcactttagagaggtagcgagtaaatacaaaggaagtaccggaaccgtcagcacgacgtatcacagcaatatcttgttccggcagtttgactcccggattcaattgagtaattgctggatcattccactttttcactttacctaagtaaatatcgcctaaagttttaccatccaatgtcaattcaccagatttaatccccgggatattaaccgccagtaccaccccaccgatgacggtcgggaattgaaacaaaccatcagcagctaacttttcatcagataaaggggcatcggaagccccgaaatcaacggtatttgccagaatttgttttacgccaccggaagaaccgatgccttgataattgactttattacctgtctctttttgataagaatccgcccacttggcatacaccggtgcgggaaatgtcgcacctgccccggttaaactagtggcagcaaatacaggcagggttgtcaaagaaaacgccgctgccattatgccggttacggtggtacgcatcagtttcataatccctcctaatgggatattgagaatcaacaaagaaatgtatacccgttatccttcaagtggcctctttgttggctgcactcgctcaccccggtcacatagttcgctatgctcccggggactcgctcccttgccgtcgcgatgcatcttgaaatccatagggtatattcgtcaaatcaaaaaaggtgcaagaggaaaataggtcaatttaattacagcaaaatgtcttaattatgacatttttatgatagcgcaatcggcacttaacctgtaattgacataaaactgtcatctccacacaccataaaaatcaaatataggagatgattatcaagccgttaaaaattatcttccacaacaggaatacagacacggatagataatccccctctgaggctggtgcccatttcaattttcccatcatgagcatcaataattcgctgaacaatcgccagacctaaccctgttccactgctgctgcgcgctctttcgccacgaacaaatggctgaaataaccgtggcaaatcttcctgtttgatgccggctccattatcttctacctgaaaccaagcaaatttatttgtctgaccactactcactttaatccagccgttaccataacgattggcattaaccaacagattagccaatgcccgtttaatagaaatcggattggcgttaacggttattgggtgaagagacagatggttttcaatatcctgttcatagccattctcggcggaaataacctctttgagaatagaattcagttcacaaaactccattggcatttcctgcccggtacggagatagtcaatgaattgctcaataatggcgttacactcttcaatatctttattgatagattcagacagataagtatcttccttgctcatcatttctgttgccagtcgaatacgtgtcagcggcgtacgcaaatcatggcttacgccggcaattaatatcgtgcggtcactttccaatagttttatcccggcggacatttggttaaatgcgcgaatggctgcacgaacttccagagagcccgcttcccgcaccgccggcatcataatacctttacctgtttgcctggcggcatactccatttccagtaaaggccggttctgaaaacggatataaagccagatacaaccgaataccagtaatagaattgccagtgtatagcggaaaataggagagaattgattttgttcgatctcagtcaaaggaaccctgacccaaatatcgggggccaaataagaattaagccaaagtatagggctatctgtgtttatttccagacgaagatcagccttgccaccaaggtactcgcccatcttctcactcaggaaatcataacgtctggcccaacataaaccttgtatctccgcatcagattcagaatagagcgtaatacccaattcctgataaatctcccggcgaactaccggcgatatcaccagaaaagagccatcctctaacttcaatttttcagccattagggtacgaacttcatacgctaataccttattgaactgctgcaaacttggcataataacgaaattcacaacaaccaagtagctggttaccagactgataaacagcatagccataatcaggaataaagtatgggtaaacgtgctgcgaggggagaatcgcaataatctcatacacgaattccgtctggcacaaagacatagcccagaccccagatagtctggatatagcgaggatgtgtaggatcttcttcaatcacacggcgcagacgtgaaaccaagacatcaatcgatcgcttcatcgtgctatattcccggccacgcgctaaattcatcaacttattacgggacagtggcacgccaggataagaaaccagtactttcaatacagcaaattctccactggttaattgaatatgttcatctccctgaaacatttcccgcgtactcaaattgaggctaaacttaccaaaattaataatcgcatcatcctcagccggtaggcccaataacttattcgcctgacgacgtaataccgcccggatacgcgctaatagctcacggggattaaatggcttcggaatataatcatcagcaccaatttccagcccaacaatacgatctacctcttctcccctcgcggtcaccataataatcggtaccggattactttggtttctcagcctttggcaaacagaaagcccatcctctcctggtaacattaaatccaatacgattaagctaacagattcccgtgtcagtaagcggtccatctgctccgcattagcagcactacgtacctgaaaaccttgttctgtcagataacgctctaataacgttcgtaaacgcatgtcatcatccaccacaaggatcttgttatctacttgcattatcaaactccaaaaaacactacatgctttgataaatttatcattttgaaagagattaacccaaagatagaaaccagatatctgtattttgagactattcctaataggacttatttccacggttattaattcgaatgattaatttagtggtttattactgacaatgagaacgcagtaattcactgtcaactatcgaatttctaccgttattttgccatccaccaatccatcaattagcaccctggtgaccggcaaatcgatagaaatctatttattagcgggattaaattcatcaggcagactaaacgaaaaatgccctttgctgcatattatctgcttacctccgccacggttttcccttactaacgaggatctggatcgataatgttcagctcaccaacgtttgaacaagaaatcacgcgacggtcgaattttcgtcacctttcctgactatagtaaacaatttcgcttgttttttcttcacttaaaccttaacagcctgtttcatcaccagcaagattcacagcatacatactattcagtacacagaaccataaattatatgatgaacgttataaatattagagccaaatatcataatgagcagacaggtaaagcaatcttgttaccgataatgactaaaaaccgagtcttaatttgacatcgaccaaaatgggctgttttatataccctatggatttcaagttgcatcgcgacggcaagggagcgaatccccgggagcatagcaaactatgtgaccggggtgagcgagtgcagccaacaaagaggcaacttgaaagataacgggtatacacttatatgagattaactacggtatctacatcaagataaaatgaaaactaaactgataacccgtgaaggctacaacaaattaaaggaagaactggattatctctggcgtgaagagcgcccagaagtgactaaaaaagtgacttgggcagcaagcctcggtgaccggagtgaaaacgcagattatcaatataacaagaagaggctacgggagattgatcgcagagtccgatatctaaccaaaagcttagaagaattgcggtgtgttgattactcccctcaacaagatggacgagtgttcttcggtgcatgggtagagatcgaaaatgatcaaggtgagattaaacgcttccgtattgtcgggtacgacgaaatttttggtcgcaaagattacatatccatcgattctccaatggcccgggctttattgaagaaagaagttggagacagtgcaatcgttcatacaccaacaggaaaagtgttgtggtacgtgaatgagatcgaatatacgaaatagcccattaaaaaatttaaaatgggtagattcacataattaagtgcaacattgttaatctggaagtaaacatgttcgtattccattaaataaattttttaagtaattcctccatttttaacgaaaatcaaaagtagatttgtaattaattagttacctgcttctggaataatgcgatgaaactcaagtttttcctattctagctatccttttagtttaattctgatattcggaaacagctcatagcaaatccggtaacccacttagggttccagcgacaacttttcacatttgagttcaatcgcggttgctatagcgtaactcgtcaaaataagattagacgtaaactggaaattatttctctcagaacgtataaagaaggctttatgaatatttaaagcttatccaccagaagaaaatgcaacatgaatgaatctctgagccaaattattgcaagtgagctacaggcgcagccacaacaggtactttctgcgattagcctgcttgatgaagggaatactgtcccttttattgcacgatatcgtaaagaggtcaccggcggtctggatgacacccaacttcgccaacttgagacccgccttagttatctacgcgaactgtcggaccgccgccaaaccattcttaaatccattgacgagcaaggtaagctaaccccagaactgaccgaagccattaatggcacccagagcaaaacagagctggaagatctttatctgccatataaaccgaagcgtcgtacccgtggacaaatcgctattgaagccggtcttgaaccactagcggattccttgtggcaagatccacagcaagaaccagagcaggttgccactacctttgttgataccgataaaggtgtagcggataccaaagccgcgctggatggtgcacgttatatcctaatggaacgttttgccgaagatgccgcgttattggcgaaagtacgtgactatctgtggaagaatgcccatttggtcgctaaagtcgttgccggaaaagaggaagaaggcgctaaattccgcgactattttgatcatcatgaacctatcgcacaagtcccttctcaccgcgcactagctatgttccgtggtcgtaatgagagcatactgcaactttcgctaaatgctgatccccagtttgatgaatcaccaaaagagagctattgcgaacagattattacgcagcatcttcatctgcgcctgaataatgcaccggcagataactggcgtaaagccgtcgtaaactggacctggcgcgttaaggtattgctgcatcttgaaactgaattgatgagtaccttgcgagagaaagcggaagatgaagccatcaaagtattcgcccgtaacctgcaagatctattgatggccgcgccagcgggtatgcgcgcaacaatggggctcgatcccggtctacgtaccggtgtcaaagtagctgttatcgatgcaaccggcaaactgattgccacagacaccatctatccacacaccgggcaaacggctaaagctgctgcaagcgtggcagcattgtgtctcaaacatcaagtggaactggtcgccatcggtaacggaacggcttcccgtgaaacagaacgtttcttcgcggatgtgcaaacacagttcccagagataaaagcccaaaaagtgattgtcagtgaggcaggagcatctgtttattctgcctctgagctggcggcacaagaatttcctgatctggacgtttcactccgtggagcagtctctatcgcccgtcgcttgcaagatccactggccgaattggtgaaaatcgatccgaaatccatcggtgtcggtcagtatcaacatgacgtcagtcagagtcagcttgccaaaaaattggatgcagtcgttgaggattgcgtaaacgccgtcggcgtagatctcaataccgcttctgttccactgctaaccagagttgccgggttgacccgtatgattgcccagaatatcatcaactggcgtgatgagaatggccgtttcaataaccgtgcacaattactgaaagtcaatcgtcttgggccaaaggcttttgaacaatgtgccggattcttacggattaatcacggtgataacccgctggatgcatcaaccgttcatccagaagcttatccggtagtggaaaaaattctggcggccactgagcagaaactccaagaattgatgggtaaccctatttcattacgtggattacaacctcaggacttcaccaccgagcaatttggtgttccaaccgttaccgatattttgaaagagctggaaaaacctggccgagatccacgcccagagtttaaaaccgcgactttcgcggaaggtgtagaaaccatgaatgatctgcatccgggaatggtgctggaaggtgcggtcactaacgtgactaactttggcgcatttgtcgatatcggcgttcatcaagatggtttagttcatatctcttcgctgtccaatcgctttgtagaagatcctcacaccgtagtaaaagcgggtgatatcgttaaagtaaaagtgttggaagttgatctgaaccgcaagcgcattgctctgaccatgcgtcttgatgagcaaccgggagaaacccactcacgccgcagtaacaataacaatccacaaactgaccgccgccctgaacaaaataacaggaaccgtaatacttccggttcttctacctcagccggaaacagtgcgatgagtgatgcactagctgctgcatttggaaaaaaacgttaagattcctatcactgtaaacagatgcactgcttcggcagtgcacgtctcatagttcctgccagaaagaatccaaactcacagattcatatcaactctgagtgactaagtgattaaattaacaccaaaaatgaaaataggattaacattgaaattaatgttggttattattctcatttgcaattattatgaattggatgcaaatcatacttcataataatgagtatgactcattttcgatattataccctacggatttcaagatgcatcgcgacggcaagggagcgaatccccgggagcatagcgaactatgtgaccggggtgagtgagtgcagccaacaaagaggcaacttgaaagataacgggtatatcttacttatcacatatcccggaaggtcatatgcaacttcttccagaccatagttacaagatcattggtttttcgccgaagatcagcccggcttaccgacaaaaattgctgtcattaggtatgttacccggttcttcttttcatgttatccgcttagcgccttttggtgatccgatacaaattgagactcgcagagtcagcctaattctgagaaaaaaagacttggaatttctcacattagacagcgttcaatgcaacgcataatccgttgcaagcaacgaaacggttactcctaatctaatttggcaccaacaacatgaaagcactgaccattggcttaattggcaaccccaatgccggcaaaacgacattatttaaccagcttactggcgctcgccaacgtgtaggcaactgggctggcgttacggtagaacgaaaagttggccgttttaccactgcggaccataaaattgagttagttgacctaccgggaacttactctctgaccacgatttccgaacaaacatcactggatgagcagatagcttgccactacatcctgagcggtgatgctgacatgctgatcaacgtcgtagatgctgctaaccttgaacgaaatctctatctgacgttacaactgttggaattaggcattccatgcatcgttgcactcaatatgttggatattgctgacagtcagcatatccaaattgatattgccgaactggaacaacgcctcggctgtccagtcattccaatggtttcgactcgtgcaactggagtgaatgagctgaaacgggcaattgaccaccataagcagaatttcgggcagtcactgattcactaccctgattgcctgttgcaagaagttgagacgttatctggtgtaatttcagacaattttcatgctcaacaacgccgctggctagcgcttcagatgcttgaaggggatatttacagcctggaacgttccggccttgctacctcaatgctgattaaatccaaagaacgtttgcaacaacagcaacatgaagagcctgaactggtgattgccgatgcgcgctatcaaagcatcaatacattgtgcatggccgtgattgatacccaaaaagccatgccaaacaaactcactcaggcaattgacagaattatcctcaatcgttggttaggtgtacctattttcctggcggttatgtatttaatgttcgtgctggcaattaatatcggtggtgcgctacaacctatctttgacagtggttctgttgctattttcattcatggggttcaatggcttggtcataccttaagttttccagaatggctgacgattttcctcgcacaaggtctcggtgggggtatcaacacggttttgccgctagtaccacaaatcggcatgatgtatttattcctctcttttcttgaggactccggttatatggcgcgggctgcgtttgtcatggatcgtctgatgcaagttttaggactaccgggtaaatcgtttgtcccgttgatcgttggcttcggttgcaacgtcccatccattatgggggcgagaacgctagatgcgccgcgtgaacgcttaatcacgattatgatggcaccctttatgtcttgcggtgcacgattagccatctttgccgtatttaccgccgcattctttggcaaaaacggggcaaccattgttttttccctttatatattgggcattgtcgtcgctattctgactggcctgatgttgaaatacaccattatgcgtggcgaagcttcacccttcgttatggaactcccggtttaccatattccacatctaaaaaccttgcttctgcaaacatggcaacgtctgaaaggttttgttatccgtgccggtaaagtaatcgttatcgccagtatgtttattggtgcactcaacagcttctcattctctggtaagacagtggatagcatcaaccaatccgctctggcttcggttagcaagattattacgccagtattacagccaattggcgttcactcagataactggcaagcaactgttggtttgataactggtgctatggcaaaagaagtggtagttggaacattaaatactctgtataccgcagaaaacattgctaatgaaccgtttaacgcagatgagttcaacctgtttgctgagctgaaagatgcagttggtgaaacttgggatagtttgaaagagacattcactctgagcgtgctgaccaacccaatcgaagccagtaaaggtgacggtgaaatggatagtagctctatgggaacaatgagtgccaaatttggctcctctatttcagcttacagttacctgatctttgttctgttatatgtgccttgtgtctcggtgatgggcgcgatcgctcgtgaaaccagccgtggctggatgacattttccattctgtggggattgaacgtggcttattcaatttcagccctgttctaccaggtggtaactttctcacagcatccacaaagcagcctgatcatcattttgaccgtcgttctatttaacgcgctggtattctgcttcctgcggcgggcacgcagccgtgtgacgatgaagttaatcagcaacccgggaaatagttgccactgctccagtggaaactgtcactaggaattgaaaatgattagcctattacaagtaagggatgccgtcgctctgaatgggcgagcagatgctaagttgttaagccaccagctttctgcttcattatcgatggtagaagcgatgcttgaacaactcaccgtaatgggcaaactggaaaagctcaatgcaactgcctgcctgagtggcagttgcaaacagtgcccggaagtacagcaatgtgacacggtggtttatcggatcgctgggggatactgagccatattatagaatggctaatcatatatagttaatctgagacaactcccctcttttaaaggggggcttatcaacaatctgttggtccaaagagtcataagccataactaaacacatacaatctattgacttacaggcatttggaaaataaatcttcctccaagcgcggcagcatagcggcttaaagtatccagatttggcacacttttaccattttccatacgactaatattttgcttctgagtgccaatcttctgagcaacatcttgttgagtaagatgtaacgctttacgtgcatctttcagctgtttcatcaacgccttacggatctggatatcgttatatgcttccagagtcgcggcatcttctaagagaagcgttttggcttcagaaaacgggataatatcataatcattatcagacatttttaagactccgtttaacctcttgcattcgttggtttgccagatcgagcgatttcttcggcgttttttgggttttcttttgcagtatatgaacaacataaaactgttgtccaactgcaaaaaagaaaaatccccttgcaataccctcagaagcgctcactcttaactccttaagcccgtttccaatgtctctgactttaggctcttttaaatctgttccagcagcttccaattcttcaatggcttcaatcattgaaactttgagaccaacaggtagcttagaaagctccttgagcgcagatatactcccaataaaatcactcaaaaaattatgcgtaccaacagcattcacgcggcagacgctttacctttccaaatcacgccaataaaaatctgttatctcatcgaccttgcaatacttctctactagcaaattcagtcaacaatccaacaaactcatccggatgagaaataaaaggcgcatgagcggcatggcgcatcatggctgaaactgaacgcggccatttttcatcaagaatgttgataatttttcttggcaccaacccatccagataaccgtaaatccgcaagaacggtatggcaagctcagccaaaggctgccttaaatcttcggtacgcaaaatttccaaaccaacatgcagcacttcaacagaaggcatcggctgcgccagcacaacagatttcagtaatcgcgcatcttgacgagcgctgtcagtacctaatgtctgtaaagcaagaaaacgctcaactgtgcgctggaaatctttactaagctgatgttcgaaatcgtgcaaaacttccggcttaatccccggccagtcactttctgcgctgaaatgtggtgaagaagccacggtaattaatccggcaactttatcctgatggtcaagcgctatccggctggcaaccagacctcccaacgaccaacctagccatagcgcattttcaggcgcatatcgccagacttcatccgccatgtcagcaagattcatcgggccatatttctggctacggccataacccggcaaatccaccagatgcaaacgaaaatgcggagcacatcgcatttcaatggaacgccaaacttccgcattcagcccccatccgtgcagcaacacaagatcacgcgaaccttcatcagaagtctgccaaaacagatcagccattgttattctcaactttatttgccatcaaggaagaagtctatgctaacaatggttgggtactgttggctatgccatcagcctctttggtttccacatcatggagtatgcagcttttgcaacaagcggctgaaacgtttgacaaacatgtgcccgtgctgtgcactaccctcggaactcccttcactgccttgtgggcgctgcctcaaaaaaccgcctctatgggagaatatgatataccctatggatttcaagatggatcgcgacggcaagggagagaatccccgagagcataggtaactatgtgaccggggtgagcgagtgcagccaacaaagaggcaacttgaaagataacgggtatagcgattaccgactattgcccaccattgagcggcctgatccgccgctataaatatcactagagaatagattaaaagatttaagtcaaagaaagtgtaaaatgaaaaataattaccattgttttatataggcacgctttacaactagaagtataaaataagaaaaggaaattgcgacgataagaatgagaaaaatataaggggatttataatatgaaattaaatatcccatcagaacaggactgacagctgcacccaaactgcctaggttttgtattgcgaagtaatgcccccttaacccctcaggtgctatactgtcagtaagcgcgtaaaggacggggataaaaatgatctctcccaacgagaaagaaaatattgcaattatccaataaatcaagttctgttcagaatagataaaacccaaaataccgaggatacaaaatatgggccttccgtttcataatgaagttcatggcatcagtattgaaggaagggaagcggtgtttagggaaggtgatttctcaggttctcttcaggaagtaaaaaataatattataaaatatggtaatatcagttcctgtacatttattaaagggtggtttgaaatatccttggctaattggtcacgaccaatagctgcaatctatctggatgtcgatcttcaaaaatcaactcgcgactgtctcaaatatctatatccatggttgacaccaggtggtagtctttattcacaagacggccacttaccacttgttcttgatgtttttgaggatgtgaatttttggctcaatgaaataggtactctgccacctatagtagtgggtatcaggaaaaagaaactaataaaaataacaaaacctgatacaccttctctaccactactttaataatattccttcaactgccaatacggaatttatatcgtttacctatccatataagcgtgcccgggataacctcaatatttttaatttcatcatcttctttacttttatcaacacgaacagcccctgaacgaattaatcgccttagttcagaacggcttatcgctggcaaggctactgaacaaagatccagcagtgttatataagagccttttggtaaaatcaatacatcatgatcagcctcttcaggtgtccgcttttgtactacacgctcaaaatgctcagtggcctcttttgcagatatgtcatcgtgatatcttttaacaatattataagcgatatcttttttgatcttcattgggttaaggcccaattctagttgactgactatcgcagattgtttttctgcctccatgtctgtagcaagtgtcaaataattgataatgacactgtcaggaattgacattactttgccatacatatcatttgcattatcagttaacccaatataattattttttgacttactcattttttcaatgccatctagcccttctaataatggcattgttattactatttgcccttttttctcataggcttcttgaagtgttctccctaccaagttattaaataactgatctgttccgccaagctcgatatcagcatcaatcataactgagtcatatccttggagaatagggtaaataatctcatgcaaatggactggtgcttttgattcaaatcgggttttaaaatcatctcggtgcatgatttgtgcaagagtgattttagagattaactttatgacattactgaatggcatattgttaaaccattctgagtttttccttatttcaatattttcgatatttataacttttgcaagctgatttatataagtctgactgtttttattaatttgttcaggtgttaatggaggacgaagcttatttctcccggtcgggtcaccaattccagccgtaaaatccccaatgataacaacaatccggtgcccttcatcctgaaaatctttaagcttttgtaatacaaccgcatggcccaaatgcaaatcaggtgcagtcggatcaaagcctaattttattgtcagttttctattttcttgtcttgcaagagcaagtttatcctgtaaccctaagggtggctccataattgcgatgtttgaaagcaacttatcaatattctctttcatataggtaacctaaataattacgtttattaacgatgaataaaacaactttataccatgtttataacaatctctattgtcaagtaaataattattcattctggtcttgttgcattaacgacgatgtagtatgcaaaaatatgtcgtttgttttttaattaggtcgtcttgtcctctttcgtgatgcaaacgaaaatgcggagcacatcgcatttcaatggaacgccaaacttccgcattcaacccccatccgtgcagcaacacaagatcacgcgaaccttcatcagaagtctgccaaaacagatcagccattgttattctcaactttatttgccatcaaggaagaagtctatgctaacaatggttgggtactgttggctatgccatcagcctctttggtttccacatcatggagtatgcagcttttgcaacaagcggctgaaacgtttggcaaacatgtgcccgtgctgtgctctaccctcagaactcccgtcactgccttgtgggcgctgcctcaaaaaaccgcctctatgggagaatatgatagcgattaccgactattgcccaccactgagtggcctgatccgtcgctataaatatcaccgcaccccacaacttgcgtcagttctggcgcgtctgtttctgctgcactggcaacagggctatcgtgatggaagatggtataaacccaacattctgctcagtgtgccactgcatcgacaccgacgatggaaacggggatttgatcaaagtgtattaatggcaaagcagttatcagaatggctacaatgcgattaccagcaaagctttctacagcggacgcatgctacactaccacaaagaaatttatcggcagcacggcgtaaaattaatctcaggaaagcatttcagctttgtggctccgttacgggacaacatgtcgccatacttgatgatgtgattaccaccggtgcgaccatgaccgagatttcccgtttgttaattcgtgctggcgcccgttcagtgcaggtttgggcgatctgtcgaaccttgtagtcaatacgaaaatgggcgtattataaccaactatagcagtcaactattgagcaaatgatatgattaatattactgaagcagcgcaaactcattttgccaaattactggcaaaccaagaaccaggtacacaaattcgcgtatttgtcatcaatccaggtacacctactgctgagtgtggcgtatcttactgcccgcctgatgccgttgaagcaacagatactgaactgaaatttgatcaactgtcagcttacgtcgatgaactgagtgcccccttccttgaagaagctgaaattgattttgtcactgatcagttaggctctcagctaacattaaaagcccctaacgccaaaatgcgtaaagtttctgacgattccccacttgccgaacgtgtggaatacgttttgcagtcacaaattaatccacagttagccggtcacggtggccgcgtcagtctgatggaaatcactgatgatggttttgctatccttcaattcggcggcggttgtaatggctgttcaatggttgatgtcactctaaaagaagggattgaaaaagagttactgaacatgttcccggaactaaaaggggtaaaagacttaactgaacaccagcgcggtgaacactcttattactaaaaatgtattactaaaaatgtattactaataacgtattactgataacaaattttcccgctcggataatcgtcgggaaaacattattacaataataaccaacgggataagttctaagagcaattcaatatatatggaacattttcagactatcagccctgagcaggcttatcaacactggcagaataaatccgcgattatggtggatatccgtgatccacagagtttccggacaggtcatgcatgtggcgcttttcatttgactaatgacacgttgaatgaattgatgttacaagccaatttcgaacaacctgttatggtcatgtgttatcacggtcatagcagccagagtgccgctcagtatttattaaacatcggttttgaaactgtctacagcattaatggcggctttgaagcctggcgcagagactatcctcacgctgttgactccttacataatccggcataacacacctcatgatccgcgtaatcgctatttcaaacccgcgtctagcgcaagcctttatcgattatatggcaacccatcaggtccatctcactatgcgccccagtcacgatgggcaacacgtcgaactgtggctagaagatgacactaaacttactctagttcagcaagagttggagcaatttactcgcgatccgctaaatgaacgttatcaagcggccagttggcaatctggcgatgtgaatcacccattgaagtaccacaataatctgaattggcaatacttaagtcgtcaggctggcccattaacccttaccattttactcctaaatatcgtcgtttatctctggatgcaatttgccggcgattatcaggtgatgtcttggctggcctggcctaacgatagccaacatatggaactatggcgttgggtcacccacggcttattgcacttctcactactgcatatcatctttaatctcatgtggtggtggtatcttggcggacaaacagaaaagcacctcggtacaggaaaactgtttgtcattatgattgtttccgcggttttcagcggttggggacaatcattattcagtggttctcactttggcggcctttctggtgttgtttacgctttaattggttatgtctggctaaccggtgaacgtgcgcccgaacgtggtattggtgttccccgtggtttgatggctttttcgctcttctggctaattgttggatacttcgatgcatttgggctatcgattgccaacgccgcccatttctccggtttaattatcggcttactgatggcgttatgggataaccgtcatacattcaaaaataataaccgacatttttagaaacttaggggactatcgtgaagcaaactcaacggcatgatgcaatagttgagctggtacgccttcagggctacgtcagtactgaagagttggttgaacactttaatgtcagcccccagactatccgccgtgatttgaacgacctggcagataaaaacaaaatacagcggcatcacggcggtgccgcgttgccatcaagttcagttaatactgcttatcacgatcgcaaaatcatgtggtcagaagagaaagcacgtattgcacaacgtgttgctagccatatcccggatggcgcagcactgtttattgatattggcaccacacccgaagctgtcgctcacgcattgttaaatcataaaggtctgcgaattgtcactaacaacctcaacgtcgctactctgttgatgacaaaagaggacttccgtttaatcttggcgggaggggagattcgttcccgtgatggtgggattatcggtgaagccacactggattttatttctcagtttcggcttgattacggcattctcggcatcagtggcattgacatggatggctcattactggaatttgattaccatgaagtacgcattaaacgcgcaattatcgaaaactcccgttgcgttatgctagtcactgaccattctaaatttggccgcaatgctatggttaatctgggtaacatgaatctcattgatcacctctttactgaccaacttcccccgccaagcatccataaagtgattgagcaacataacgtgcagcttgaactctgctaagaattttctctatattcgggggatagcgctatcccctatctccttgccgttccacaattacactatcttttagcttcttcattaatgccatgcaaattatatggataaggtaatatttgctatccatatcacgtgagcatgttttttcttaacaaatagttggctattgatcgatttctgattacaatcatgagcgaaaacgagcattaaagaactgtttcgaacattttagggggatgcatggaaactaaagacttgattgtgatcggcggcgggatcaacggtgccggaattgcagcagatgctgctggccgggggctctctgttctattgctggaagcacaagacttagccaaagccacatcatcctccagttcaaaattgatccacggtggcttacgctatctagaacactatgaattccgtttggtcagtgaagcgctggcagaacgtgaagttttactgaatcttgcaccacacatcgcttttccgatgcgtttccgcctgccgcatcagccacatttacgtccagcatggatgatccgcattggcctgttcctctatgacaatttgggcaaacgagtcagcctgcctggcagtaaagggctaaaattcggtgccaattctgttctgaaaccagaattggtccgtggctttgaatattctgactgctgggttgatgatgctcgtttagttgtccttaacgctcaagaagtcaaaaaacgtggcggggaagtccgtacccgaacaaaagtgacccgtgcatggcgcgaacaagagggttggatggttgaagccgaagatctgcgtacaggtaagacctatacttggcgtgcaaaaggtctggttaatgctaccggcccttgggttaaagaattctttgacgatggtctgaaattgaaatcaccttatggtattcgcctgatcaaaggcagccatattgtggtgccaaaagtgcatgatgagccgcaagcttatattctgcaaaatgaagatcatcgtatcgtatttgttattccttggatggatgaattttccattatcggaaccaccgatgtggaatatcaaggtgatccaaaagaggcgaagattgacgatcaggagattaattatctgctgagagtttataacgaccacttcaagaaacaacttaaccgtgacgatatcgtctggacctattctggcgtacgtccactgtgtgatgatgaatccgactcacctcaggccattacgcgcgactatacccttgacatacatgatgaacagggcaaagcaccattactgtctgtgttcggcggtaaattaactacttaccgtaagctggcagaacacgcaaccgaaaagctcatgcaatactatcccacggccggaaaagcctggaccagaaatggtcagttaccggggggtaatttggaaggatgcgatcgtgatggttatgcccgtttattgcgtaaacgttacaactggttaccggaaggcgttgctgtacgttatgcgcgtacttacggcagcaacagcgaactcattctgcaaggtgctaataatctgaccgatctaggcgaatccttcggtcacggcctgtatgaaacagagcttcgttatctggtcgataatgaatgggtcgttgaactggatgacgcaatctggcgccgtaccaaattgggtatgtggctaaaagaagagcagaagcaacgcattgcagcatggttagcggagaatgctaaaccacgcactgagatttgatttttcttcacagaaaatcattgatcttccagtttagaaaacgtgactaccgcgagaatattaaaacctttctcgcggtttttattgcgtagaatttatatccgatttctccctccaatgttatatcaatctttccaattcctgattgacacataaattagccaaatattatatatattcagtgtaaaatactgcctcatgttccctgttggagcaattaaccacgaacattttaagattcttatataaacaatactagcaacttcatagcaatcattaccattcttcgcgtaacttaccttgatatttcaatccatccaactttttatccccccataaaccaaaaacgctattattctgttctggaatattagcatcaagataagtatctaccgctcttcggctctgtgtagcacgtgacttatcaggagaacatttctctacaatttcacgctttttaattgtttcttccagcagatttatattaatttctaccatagcaaccatatttatttccccttatcaggtatatgtatcatatacctcattagttcgactgtgtattttttgatccaaaaaattattgtgataactaatcaacagattttactctgaaaatatctattgatcatgtaaacaaaacatttaaaacatgtgacttttccatttgcaacaatacctaaaataatctataaataaagctgttacatacatatcgatactgtttaaccctatctttgattagataaaaattcaaataaaaacaaattgttaagttatttttagggaatgaacttaacaaacaacctggtagcaatagatgccccaaaattataacttgtgagatattacatgactattgatatagatattgatcaactattaaaagcagaagcttcatttatgctagggaccctgacattagaatccaacattatcgaggttatgaagtacgaaagtggcacccttttgataacccaagatagtccattctacccaaagaactataagtggccagaccaactacatgataatggaataatttcaataggcgataaagaacttgctgtgacaaaagtttacactgcgggccttattgatggtcttttatatatagatcaggaaataacgaaacaaacaacgtcgccagaaaaaattatgccagcacactacttacctgatttacacggaatttctgagagagatcttatagggaaaacagtaactctatctgtgaacgatgaaacaaggtataaggtaagtgctgcacactctatggcccactttatgtcccttgctgtaaataaagcaacacatcatatatggtccaaagtgtacgataccgatgatttgggaaactataatttagataaagctgccatttaccaatcttctattacagaacttaaatccgttgatatttatcgctttggtaaatcgatcaaaaagaaaggatttgataaaaatatactaattaaaaatctggataaaattaatagagaagttaataacacactcaataattggttatctcagggtgcggaaataaccattgaatataaatcaaaagagattaatgacactagattatggaaatcgactattgactctaaggtagtcactatcccatgcggaggcacacatataaataatattaatgaagtcaaagacgtaaatgttgaaataaaaatcggtgaatctgctgattttattcaagtaacgacttattgcagagtataaaactatgaacctcgacctactttatttctatcttctgctggttgttttatcctatatacccaatggatttcaagatgcatcgcgacggcaagggagcgaatccccgggagcatagataactatgtaaccggggtgagtaagtgcagccaacaaagaggcaacttgaaagataacgggtataaataaattaaatacttctctattgttctaccataagaaatatcaatccttctgtaatacatctttgacagtatatccttgattgggatgattcggtgtctgtggaaatgccatcattagattctgcttattaagcagtggttttatatggcgctgtctgagattctttgcagaacgattaagtagtatgcctaacacatcaatacggatatagtgagattgacaaagtttcataataatcgattgcatttgttctagatctaatcgacgattttcataagctggtttagcaatttctcgcaatttttctcttaaatcggatgttatgtactttaagtcatcaataaatggcaggctaaacgatgaaggagcaagacgccctaactcatctcggtggatttgaatacctgaatatgaatgaggcaagctagattccttatggggtaagtccaatttattattaatattatttattgttccagcagagaaaagttcttcagggcttggtaacgacatacccggcaatgtataagacttattacgcttctcacctgatgagactaaaaatcctttattctcaaggcgaggaaaggccaaagtgacttctcgggagtgtagcgttgttaactcacaggcccgctgatgattaggctgtgtcccgcaataggctgagatagaataatctatctggctctgactttcggaaaaaacatgttatggctcattacgaccttcctgatgaagcatgggagtgattgctccccttataaccggttaaaaagtcagggaataaaagtgataattctctataaatcaaatgaaaaagcgtggtcagatggacgggttaaattcgaccatgaaacgtatcgaagaagaaatgttgtagaaagatgtattggtcgactcaaagagcatcgtcgcatcgccacccgttatgaaaagacagcacgctatggtgaaattaggttgtatctgcttatttcttaaggccataatttagttgagggacataacctagaaatcggatttatgcctcagaaaaatcaacagagtgatccagcgcaagcaacagaccatctttctgaaaaattgaggctgtaatttaaatagttacttaacggcgtgtactattccgttgtttctgaactctattattgcttaaaattagtaaagaatttcaagttgaataggatcacttattattttaataatcccagtgtcagatttttcaaattcaatttgatatttttcattgtcaatgcctgtgataatattatctagataagaatatgcaaaccttattgatttgttcttagcccattcaggtaataagtgtacatagtagttaaaaactataaatcctctttttttatttatgtaatttatatttagaatgtcttttaacatcattctaccgtaacaaaaatcaccatttttattaaattctttttttcctaacttggttaagttccataatttattttttcctcttttaaaatccaatttcactaatccagcatcaacaagagattccatgttcgcattaacccatatagaattttcattaattgatactggccattcagtttcacctaggcataataatattttatcgtcaatttttttttgtattttttttctaaaagattcattttctcctgaatgacaaaaaaaagataaaaaaacaaaaaaaaataaaaaaaatttcataaactacactccatattatattctgtcatggcatcactaacatttttatattttttctttgtaagataggatttagtataatcccaataataatttgaaataccaggcacttcattgttatattttatatcatatttaataaattctactgggtattctccaaatatgtcatcatcattattttttttgcgaaaaaaaataatataataaactccattttttacccctagctcgtaatcttgtatttttatttcagaagcagataatttaaaatcaaaccaagtaaaaccagtatcatttgggagtggaactatattaaatttcccatttttattttttataaaaacagttaatgtgttacttggatgagatgtattgttttcaaatttggcataaaaaattacatctttttttccatcaccattcaaatctataagattgattccatcctttagatttaccttatttccgcaatgagaaaatgcctcaaacgagaaaagtaaaataaaaataaggtaaaatttatttttcatttaaatagctcctaactaatctaaatccaacatctggcataatatatcctgaactatggttatcacaactggataagctgtttgcatgggaaagataacttccaccacaaaaatagtacaacttaactgtaccaagttcataactatcatagacccattcagaaacatttccactcatatcgtataaatctaagtcgtttggagataatttacctacaacctgtgttccaaaattacttgtattaaactctggataccatgccaccttcttagaatcattgcttccagagtgatagtatccatatcttcctaatcgtaaggcaggttctccgccccttgctgcaacatgccattcatttaaggtaggtaaacgatagccattagcgtttgtatttataaagatctctaagtttttgtctttttttctaataattttatttcctttttgaaaatatactggagtgagttttaatttctcacttaatgcatttgaaaaaagaatggtatctaaccatttaatactagtcacaggatgcctgccttcatcctgctcaggaggaagacaatcttcataatgtgacccattacatccatcatcaaaatcataaccatttaatatagcccattcatatacctctttatattctgaataagtaacttcattcttcatgatataaaaagaatttaatgtaacattagaatgagattcataattttgagcgccaaacacactaccaacgtaaaaatcaccgccttcaacaaagctgagtttcatgttatcaaatgaatatgcttttgatgacattattatagataaaaacaaataaatatatttcatttttttcctatatttcaatgttgcttttcgggtatgagcagcaagtcagtatatatccagaagatattttatctctagatattccaccagaatgatctaaattaacttcaccagaaataagctttacttgacatttaccacaatatccagaagcgcaatgatattttaatttaactccattcttataagcacatttcaaaatcgtttcattcgatgatatatcaaaagaatcatttccaatttttaatttaaagacatccatttttatctcccgtattttttaatcttaaaataatctctttcattatctttctgttttctgtaacaaaggtatctgaagccactgcattttcatttatccttcttaataaatatggcaatgatttatcaattggcccatatggcaaatatttacacgtcctaataccattgtaagctaattttgatgaaatatgatctccaatcccgtacaattgtccaatccaaaatgatttattttttaattcattcttatttaatatgattgatatactattttcattatgagttgcaaaaaaaggataaaaatactcaattctttttgatatgtattcaactaaataattataatttaaatcagtctcttctttatttaaaaaaaatgttccaattgatttttctttatttttaatctcttcttctaaataagctcctctaacaatcttaataccaactttaatgttattatcaatagcaattttatgtagtaacatcagaagatcaatggattcttttttgtaggattgtattgttaatgttataataggtaatattttattgtgtttaataatgctatctatgacaatcttgtctactgctgcctgaatccaagattgctctgcatcaatcataactttaactgatttaatttctgcataatgaaatattttttcataacgttctaatatcctactccaagaattaattttttctccaaaaaaattccaacctctcattttttcttcataaagatgaatatctcctagtgatgaaggcttaatggcaacatatggtatattggactctttgctagcgagatcaattaattttaatgttgactctagcgcattatcaaagaaaatttcgtcgtttttcccttcaattgcataatctaatatgctatgaatattattttttgatagaaaaatcacattagcctttgcttcatctatactttcaccaccaaaataaaccccatttaaaaacctaataaaaaacttattttttttatttaaaataaatctcatcatccataaggaaattttttttgtgattttatttgttaacaataaagttacaaaaaacttaagaaaaagggttgatatactatatctagaatacagtgatgtttcgtctttaaaaaccttattattgtttgattttttattagccattatttgtaatttctatagttataacaactcatatgtcactttatttttacctccccttctatgaagggggaggaatttaaatatcagcagtttgcccacggtaaagacgacgaacgatattatcgtcatcaaattcttccctttcatgaataactcttctgttatccattataattaaatcacctctttcccaataatgcttataataatagcggggatttttcataaattcagtaagctcagcaaaaaatctctttgtttcttcatctgtgaacccaataattcttggctcccagctggctggttgtccctcatcgaatggaaaatatattagcatttttctcacccatccaaggtcagtaaatacaggaacttgaaaccatccagcaggagatacatctacatagtagccatattccagaacccttacttcaaaaatttcattttctaaaacatgtaataaatgcttaggcatttctttgcatgcaagaacatgatcacaaacagtagttgctcctcgaaacttcatgttttttatttctgcggcatataaaaaaacctgatctacttgcgataacaataacccaccatcagcatgaaatgggagttgtccacgtccagtgacaacttttcctttttcgccctcaagttttaatgtatcacgatacccaaaaccaacatctattttttcatctgcatattcaactattgttccatatttgctgtatatatcacgaaattcatcagcattaaggtttattttattgactacaacaaagccttgcctcattagaagatttttaatttcttcagcagaaactttcaaaaaatcatctgcactaatgttagcaccaaaacctgacttcattattggcgaccattgtaaatttttattcatttaattatccttattaatatttctcaccaagtacttttttaaaatgcttttgagaatctctagagccaaacgaatttttatgaactaattttgattcttttctgctatcttccaagatatcaacgaattttttgttcataaatttttttgtgtttaagtatgctgttttcggatatgttgctagtaaattagcgcgttctattgctgtttctaaaagaatttctttatctattacttgatttgcaatattgtattcaatacacatttctgatgaaatctcttcgcattcaaatacaatttttttcattatattatgtccatgtgtaaaactaagtatagctgcacctacagaacaaccaataccgtgttttaattcaggcattataaatttagcttcacttgatacaattctttggtcaaacattaaagaaaattgaaatcccattcctatagcataaccatctaccgcagctactgttggtttgtttacgtttaaaacagcacaatatagatcaatcactctatctatccaacgttccacactttctcctgatagatttttaacttcactgaaatctccccctgaagaaaaagaacgattctccccaccataaacaacaatggctttaacattgtcatcttgatcagctttaattaaagattttttaattgagttttctaaactttcactaaatggattatgcttattttcatggttaagaataattaccctaattgagctaaaatctctttctattaccatatctaattccttcttatgatttcacacaacttggttgaatttgcttcctcaattgacaatcttcctgtcaaaaattctttatatatagaataactaaaccttgttttatcttgatagttatttacttcagttcctatcattgttgcaaaagatttattaacagatgatccttcatgaatacctattttttttctccacactatttcttttgggaggatatttatactatttgcatactctcgtaaaatatttttaacttcgttatctcttattttaaagtatggatccaaattatgacataaagatataagattattagtccaaaatggatgataaacattcaacccataatttcctgctccatgagttgaaaattctcctgtccatttagttctataaacttgctcagacaatattttatttggttcaatataggatttttcggggtctaatatacctccaaataatagatcagaaccatatcctgttatcaatgaattaacttttccttttgctaattcataaacattaaataatcctgattgaatctcagaagataatccgtcaaatatttcattataataaatagcttttactacacctgatataacttcatcttcactaagaattttaacttcgtgctctgtaccaagataatcagaaacaattttagaaaattcaaattcattgcttaattctgttcctatagaccatgtttttactttatcaaaatactttgatgctaaagcagtaactaaactcgaatctaaccctcctgatagtggaacacctatagtttcattatttttagataaccgggaaatagagtttctcaaatcagaatcaattatttcaagaagaacactttcttttatatcaaaagaattttcctctacaggagatattacatattcaacttccaaatgaagatatctctgttcatcaaatgttaatttatttattgtaccaggctttaatctggacacatttcttattggtgaaaaattatctggttttagtgagttcttaataacttcgctttcaggtttgaaatcaaaagctttatctccctctaccttaccaacaatcttcaaactattagtaatccaaatcaaatctgtctgtactaaatttactaaatttaatcctctagactctgttattacttctatatttccctttttatcctcaataaaaaggcaataatctccttctgctatagaaataatggaattaccaaatttatctctacttaataataaaatttccacatcactaagcacactagatcttccttctatttttccaagaatggatctgatggtagatatgttatatatattaccaattaaaaaagcagtatatctttcacttttaaatttagatacctttgttgtactacggaagagtatggttccagtagataattcatcaaattgaaattcatttattaatttatttaaatttttatcaaaaccatatttaacaaagcaaaactctgagctcaattttaaattcctttttataactttataaaagtattttaaatagttatacttctaaaaattaatctggtgttaataatagtatcatattaaattaatttatcaatgcatttgatcattaaaattaaaattatttatatatctaattaactatttgtttttaaatatagaactcgcaatattattgtaccagtgacaatcacgcatggttacattccctctgatatattatgtatctttcatggatccaagtaggtacaagttcagctaaaatcatagttgtatgcattccaatcattttcatctgattaggaattttattctgtactgtgcattatgatagagaagctaaccccgtttaatgagtgcaaaatataccgtctaactgtgcagaattggttaccgtgctacagattcaaagaaaaaatgggtaaattgcaatcgtatttatcacgcgcggtatcatcaggtatgtgtccttagcaaaagaagccaactaatagttatataaattaaatataacaaaattgtctattaagaaattaacaaatccttgcgctcactaattattgtagattaattatggatttatcaaatataactaccgttcagtcaggtcgaccaattacatgtaatgtatggttgttctggttaaggtagttcaccgagagcatacccaacaacgtactaggctgtgtcccgcaataggctgagatagaataatctatctggctctgactttcggaaacaacatgttatggctcgttacgacctttttcttaaagccataatttaattgagggacataacctaatccatccttctacagccactgtcgctaaaatcattcgatcaaggttttctagttgttcaaatttaaccccaaacttaagtttcaaccgcattaagatattttcaggtatcaagctcactgtcagtaattctaacaaagtttgttctggtgtctaacgttcatataaattaggccgacgccagtcagcagaagactagccactatattttggataacccagcatgcttacgtttcataagatttcaaatggagacgctaaatgtatatctattagttatacaactgctataatgactgtctaccaatttgctacacaggtgatttatgagaacacaacctaaagaaaccccgatcaacatccgggcgaaagccttccagcgggagcttattgaccatgcagcaaacctgctctcaaagacccgaactgatttcatcttggacgctgcctgccgcgcagccgaagatgccatactcgatcagcgccactttttcgttaacgacgaaaaataccatatgttcatgcagatgctggagcaaccgctttctgataatgaaggttttaaaaaactgatgggatataaagcaccgtgggaataagcacacctgaaatattaacggctgaacataatataaatgatttttattgccagcatgaaacattaaacgaatggctttcacgccgggctttaaaaaataataagctcggcgcgagccgcacatttgttatttgcaaggaaggcacaaaagacgttatcggttattattgtctaagcgccggttcaattaatcatattgaatctacaccatcgcttaaacgcaatatgccagatcctatccctgtagtgcttcttggccgtctggctgtcgatgtggaatatcaggggaagaagctcggggcattgcttctccaagatgcttggaagcgtgtcgccagcacagcagaacaggtgggcatttcagctataatcgtccacgcacttgatgagagcgctcgaacgttctatacgcgtcttggcttcgtccagtcaccgttggagccatacacgctgatgcttccattaggcaaacagaagtgaaagaatttttactaaaccctttttttccctttggtattattgtcggaataatattttatcccaagacaagaaccactattccttaagtattcaccaaatccaccgcttcacgagtcaggcgaccgatttcctgccagttttggctgcccaccagcgcttgactaaccatccatgaaccaccacacgccacaatacgcggtacagcaagataatcgcgaatattatttggcccgattcccccagtcggcataatttgcaattcagtataaggtgccaatatcgctttaatcattggcaaaccgccggaaggttctgccgggaagaatttcaatagttttagccccaattccattgcaccttcaatcgcacttggattattcacacccggaataataggaatattcaattgctgacaggctttgaccgtatttggattaaaacccggcgaaaccataaaatcagcgccagcctgttttgcagcaaccacctgatcacggttcagaacagtacctgcaccaatcagcatattcggctgagctgctctcaacaaacgaatagcttccgccgctgccgtagaacggaaagtaatttcggctaccggcaagccgttgtcagccaatgctttacccaacggaataatatcttccgctcggtcaacagcaatcacgggtacaatttttaactggcgtaactgttcaatcatctgtttcatcaattttctctccgctgttaaaagaaactgtcagtcactgcttgagttgcactgattggaataatcgcccctttatgctgaataacggtaccagccagacaatgccccataattgccgcttgttgtatcggacaatccgtcagaaatcctgccagaaacccagcattaaaggcgtctcccgccgccgtggtatcggccacgttaacaaccggcaccgttgggatcagctcaatcggagtatcctgtaccaaatgctgataatagcaaccggcagcccccgctttaatcacggcttctttaactcctgcttgtttaagacgaatcatggtttctgtaaccgatttatcgccccacagcttacattcatcgtcatctgtcaccagtgccaatgaggtaaaggcgagtaatttctgataacaaacttgggtttcctccacactttgccataatgccgaacgataattactgtcgaaaatgatggtttttccttgagcagccagctcagccagcaagtttagtagcttttcacgatcatcaacaggcaagatagccaaactgataccactgagataaatggcatccatctgctgtaatgcttgcataaccgaagagaaatcaggatggcgcaccatataacgggcagcggaattattacgccagtacagaaaggtgcgctctccctgtccatcaagttgaatcaaatacagtcccggttggcgaaccggatcacgcaaaatcagatgggtgcgaataccctcgtcttgccaacgtgtgatcatcccttcactgagcgaatccaagcccaacgcagtcacaaaatgaacagcaatcttctgtcggcttgcacgtgctaaataaaccgcactgttcaagacatcaccaccgaaagtctgatgcatggtcgaaaaaggggcaccattaagttcgatcatacattcaccaaggagtgcaatctgcttcatagattttctcccggcaaagcaaaataacggcgggcgttattaaaacaaatatcctcaactatctgccctaacatggctttgtggttaggaatttcgcccttttctgcccattgccctaacacattacacagaatgcggcgaaaatattcatgccgcgtgtatgaaagaaagctacgagaatcggtcaacataccaacaaattgactcagcaacccaagttgggaaagttgttcaagctgacgcaacatgccatctttctgatcattgaaccaccagcccgaaccaaactgcactttaccggcgataccgccaccttgaaagttactggccatcgtagcaatcacttcgttatctcgtggattcagacagtaaagaatcgttttcggcaactcatccgtcacatccatactatccagcaagcgagatagcggccaagcaatattgttatcaccaatggaatcaaagccgctatccgcgccaagtaagcggaacatccggctattattgttgcgaatagcgccgatatgcatttgcatcacccaaccacgggcggcatattgccggccaagccataccagaatcgccgtggtgtactgtgcaatttcaagctcagagagaatgccccctgccagccgtttttgcaggatgccatttaataccgtttcatcaggaataggagcatagcgcaaattttctatgccgtgatcagcagcccggcagccatgagcagcaaaatgctcaagccgacgctccaacgcgttcaacacatcagcaaaagcaacaatcgatacatcagccacggcttcaagctgtttgatatagtcaatgaaacccgccaactcgattttaaatacccgatcaggacgccagcttggtaatacttcgatatcgaaactctcatctgtcgcgatttggcggtgatattgcaaagaatccaccggatcatccgtggttccaaccatacgtacattcatttgctgcatgatgccacgcgctgaaaacgccggggctgccagcttttcgttgcattgatgccaaatttcatccgcggtttgcggcccaaacaatatcccgctaataccaaatggacgacgtaattctagatgtgtccagtgataaagtggatttcctaaggtcaacggtactgtttctgcccatgcctgatatttttcataatcacgggtttgcttgccggtaatcagtgattcatcaatacccgcacagcgcatagcccgccatttgtagtgatccccttccaaccaaatctgaccaaggttatcaaaccggcgattttcagcaatttcacgcggattaagatgacagtgataatcataaatcggcatatctgcggcatgttcatgatatagctgacgggcagtttcattgttcagaagaaaatcgtcacacataaaatttttcatatcattttcctgtcagctaaatcgagtgccgccacagcatgacgagcgccgcaatccaataataattgataagctgcggtaaccgcccggacaaaatgcggattagctaacactgggttaccaaaaatcgccaacaacgcgggtactacatcaacagataacccatattgctggtaaatggatttaaactgctcaaccagcggatcacgcacatcaatcaatttgccttgttcatcttttccactgacataacgcatccacccggcgatacccaaggctaaatggcggtaatcgctgccgtttgccagatgataaatgacagaatcaaacatacgttgtggcagcttctggctgccatccattgctatctgcccggtttgatgcttaaggttggggttactaaaacgttcaatcaacagatgagcatattgaaaaagatcggttcctaccggcatcgtcaaagttggcgcttgttctttcaacatcagatccaaagcggcttgccggtaatcggggttcgccattgtgtcagcaatatgcgcatatcccgctaaatagcccaggtaggctaaaaatgagtggctaccgtttagcatccgtaatttcatggtttcaaaaggcatcacatctttaacgaattgggctcctgccacatcccagtttgggcggccattggcaaagttatcctcaatcacccactgacggaaaggttcacaggtgattgcactgggatcgtatacacctagctgtccggctatctccgccaccgattctggcgtagccgcaggaacaatacggtcaaccattgtgcatggaaaagtcacattcagttcaatccattgcgccagcttttcatcacgtaagcgggcaaaacccaccaccgcttcacgggcaatgttgccattctctctgatattatcgcaggacatcaccgtcaatggcggcaagtcacgttcataacgcagacgaagcgcctcgacgatataaccaatggccgatgttggttcggttgggttagctaagtcccgttgaattaatgcattattcacatccagcttgccgctggctgcatcgatgcaataccctttttcagtaatcgtcagagaaataaccgccacttgcggctgcgctatcgtttccagaataccttgctgacccacaaactcagggtgtaaagcatcaaccatagagccgataattttcaactcagtttgttctgtccccttctccgcaatggtgcacaagcaatcttgctgtttaagttgctgaatcaaccgatgaccggagaacaaactgacttcacaaattccccaatcactgcccgttttttccaacatatgatgagtaaaaaccgcctgatgggcacggtgaaaagcgccacatcccagatggacaacacgggcaaccaacttctgacgatcataagaaggcagagaaatagcggggttaattttactgttggctatattacggatcatagaacaattcctgtttaatgacgcggattacttaaatactgagtaattcagtaacatctgaggcaaccacaagctcagttgcggtatgaaggtcaccaacatcaacgcgataaccaaagcgcaatacatgggaactaacggtttcaataccttattaatgctgacctcaccgatagaacaacccacaaacagcgcactccctaccggcggtgtacaaataccaatagctaggttgaaggtcataatgatgccgaaatgtaccggatcaacgcccatattctgcgctactggcaggaaaatcggcgtaaaaatcagaatcgccggtgtcatatccataaaggttccgaccaacaacagaaccagattaatgaccagcagaataaccagagggttttcagaaaacgccatgagtgcatcagcgatcaaatagggcagatccgcattcgccattgcccaagacatgcccattgatgcaccaatcagcaacaaaacaatggaagtggtcaccgcagaatccagaatgattttgggtaatttagtgatactgacttcacgataaatcaatactgccaatataaagctgtacaacacagcaatcgccgaggcttctgtggcggtaaaaataccggcaatgatccctcccataataaccacaaccagcatcagagaaggcaatgcacgaactaatgtggtgaaaaattcgttccatgtcggcttgggtgataccggataaccacggcgcttggcaatgattgccgccacaatcatcaaagatgcccccatcaaaataccgggaatataacccgccaaaaacagtgcggcaattgatgtgccaccagaaaccagtgagtaaacaatcaaagtattacttggcgggatcaacaaaccggcaggacaggaagcaatgtttacagcagcggagtattccggctcataaccctcttttttctgcattggtgccatcgttccgccgaccgccgcagccgatgccactgctgagcccgaaatcgcaccgaaaaacatattcgctataatattgacgtgcaccagagaaccgggcaaacggccgcccatgactttcgccagattaattagacgggcagcgattcccccttgattcataatatttcccgccagaataaagaacgggatagcgagcaaagagaagttatcaacaccgactgccatacgttgagcaaccacggtaatcgccgcttccattggtaaagtcatcataattgccagtaatgatgacaaaccaatcgcaaaggataccggtacacccagtgccagcaacacggcaaaactaccgaacaacgctaaaaccacttgccaatccataagcccatcctcttctgcctagtgactttattgattttcagaaataaccgcgtctttacctgaaaaattccgaataagagcaacaatgtctactagcacatagcagatcatcagaacaccgctaattggcagacataaatagacatatcccatcggtaatcccagcgcgggcgtgatctgcccggtttcaagggttgagatcaccagtaccgatccgccatacaccagcacgatcgaagcaaacagcatgatcgcggcctggatcaccaaacccacactatttttgcctattcccttaagtttcatcgttaacaggtcgatagctaaatgacgatgttgacctgtggtatatgccgcgccaatcatggcgacccacataaacagataacgagcgagttcatccgttaccgtacttggcgtaccaaacacatagcgggaaaccacctgccatgtgacacaaaacaccaaaaaaacggaaaggctgacggtaaaaaatgccaaacctttattgaggcaatacacaaggtttttcacggggctttgtccttattggcctcaacatgtgcccgatttgatcgaccaaatagggcaaactgtctgaccaaaatcagtaaaggaagctttacgttgcttggattataagatccaggtcaaaaaaacatccagtgagcgggatcacaaactgactggtccacccgttggcccgattattttgtgatattggtcaaccaaatcacttttactttttgacgaaatccgaagtgatgcttatggtttgaccgtcagttcagttgtgcccgtaacctatttacaacaattggagaacgaacaatgagcaattctaagcgaattttatctactgtaatcggtgcgatatttgccttaagcgcgtcacaagttatggcagtaacaacattaaaactcagccataaccataaccgcgatcatgcagtgcacaaggcaatgactcagtttgcagatgaagttcgccaaaaaacgaatggtgatgttcgtattcggatctatccagacgcacaattgggtaaccagcgggaatcgatggaactgatgcaaaatggtgcattggatttagtcaaatccaatgccgcagaactggaagctttttcgcccacttattctgcttttaacttaccttatctgtttcgcgataaagcccattacgaaaaaattaaaaacggcgagattggtaaagagattctgacatccagcaaaaaccgtggctttattggtataacctactatgaagcgggcgcacgtagcttctacgccaaaaagcctatccgcacacctgaggacctaaaaggcatgaaaattcgggttcagccaagcccaacagccatctcaatggtgaaaaatttaggcggtaacccaactccactggcttacggtgaactgtatactgctctacaacagggtgtggtcgatgccgccgaaaataatattccctcttttagcctgagccgtcacagtgaagttgccagatacttctcgctggataaccatactatggtgccagatgtccttgttatttctactaaatcgctaaataaactgtcatcagaacagcaaaaaattcttataaccgcggccattaactcttctcaatatatgacgaaattatgggaaaaatcagaggagaaagagcgccagaatgcagagaaaattggcgttaagttcgtcgatgtggatcaaaaatcgtttgaagaggcggtcaaaccgatgtacgacgacattaagaaaagcgacccaatgctttaccgtatggtagagcgcatccgcgcagtcagataaatcattggcgaaggccaaatggccttcgcccttgagcggcatttttggttgaccaatttctatttttgactattatccatacaataccatcgataatcacgacaacaatagtgacaccatgaagcatttacttgagccaaaacgtccttaccaagaagttggcatttcattaagagagatgattgccaaccagcaatatcgtatcggggatcgcttaccaccggagcgagaacttgctgaattactacaggtttccagaaccgttgtgcgtgaagcattaattatgctcgaactagaaagccttattgaagtgcgcaaaggttccgggatctatattattaaccgccctcacctgccgacttcctcttcatgctcagttaacgcagcgggaccttttgagttattacaagctcgccaattgctggaaagtaatattgccgaatttgccgccatgcaagtgacaccaaataacattgcgaatatgcgtcgagccttgcaaaaggaatccgaagatttggcctccggtgaagatgaatccggtgacagagaattccatctggcgattgcggaagcaacccataacagcatgttagttgaactgcttaaacaatcttgggcatggcgggaaaataatcccatgtggcagaaactgcacactcgaattaccgataaagattatcgtaaagaatggctgcatgaccatcagatcattttatccgccatgatcaagaaagatccggcggcggccaaacaagcgatgtggcaacatctggagaatgtaaaattacgtttactggaattgtctgatattgacgatccctatttcgacggctatctctttaactcatatccctgtaaataagtttttattctggcgtttgtatataaggtaaataacaatggaacaaacctggcgttggttcggcccaaatgatcctgtttctttagatgatatccgtcaggctggcgcaaccggcatcgttaccgcattacaccatattcctaacggacatatttggaacaaagacgaaatcttggcccgtaaaaccctcatcgaaaataaggggcttatctggtcagttgttgaaagtgtgcctgtccatgaagagattaaaacccggaccggtcactattctcaatggattaataactacaaaacttcactgaaaaatttggcggaatgtggcattgataccgtctgctataattttatgcccgtgctggactggacacgcaccgatctggaatattcactccctgatggttctaaggccctgcgttttgaccaaattgccttcgccgcatttgaaatctatatcctcaaacgaccaaatgcagaagctgattacaccgttgaagagcaagctcaggcaaaagtctatcacgacaacatgtctgcggctgatattaagaaactcaccactaatattattgccggtctgccgggggccgaagagggctatacgttagcagaatttcaggcgcaattagatcgctacaaagatattacccgcgataaactgcgtgaacatttggcttatttcctgcaccagattgttcctgtatgtgaagaatatggtttacgtctggcaattcacccggatgatccgccgcgtcctattctgggcttaccgcgtattatttccaccattgaagatattgaatggctgaccaccattgaaccaagcccggctaacggtattacaatgtgtactggctcctatggtgttcgtagtgataatgatttggttgagataattaaacactatggcaaccgaatctatttcactcacctgcgctccacccaacgggaagaaaacagcaaaactttccatgaagccactcatctggcaggtgatgtggatatgtataatgtagtgatggaaatcctgcgtgaagaatatcgccgtaagaaggttggagataaccgtttgatacctatgcgccctgatcacggccatcaaataattgatgacctgaaaaaacagactaatcccggttattcctgtattggtcgattaaaaggtttggcagaaattcgcggtctggaattaggtttaaggcgagcgttttttgaaaataaataatgaatttacgttattcactatatttactagtaaccctaaaaagggttactttatttagatgaagccatgttaaagcgattgactacaactttatacccgcatctttcaagttgcctctttgttggctgcactcgctcaccccagtcacatagtttgctatgctcccggggattctctcccttgccgtcgcgaagcatcttgaaatccatagggtatatgtacaggctcattttaaactaaaattttaatttattattttagttgatttattaatatataaatttgggatgaaaacaaaaaattcttatcgatctttctatttttcaataaataagaataggttatgccaatttattttcagtctcacctgtcgtatagtccttaggtttattttgaccagatgtctgcgggttacgataggttctcaatccacctttcttccaatctggccattgttcaactattttactcgcttcacttaaataagctaaaaactcctctctcttagtcatttttttaactcctttattaagttatctacgttagctgctgattcggtttctttttctatataagataatgatagcatcttcattctcagccttccatcctttctacgccacttaataactttgccacccttattttttctttttattttatatcctatccccagatttgttgaaaacaaattaaagaaacagcgaggcccaacacccacaaatggttcaaaaatcactttattatcataagactcttcaggtgtttaaatagaatcaggatgaaaatcaaaagctttacttttaggataaggctcaatatagacaactcgccgtataccgctagcaacgatatgttttgcacagttatgacaaggaaatgtagtacagtataatatcccattatgagtactaatgttacttcttgcacacgccaagattgcttccatttcagcatgtacaaccctgccatattcggtaatatcctttatcttgctatttaggagacatcctctaaacttttctttttgttcctcttcaatatcttcaagtatatcttcaataattaatcttttctctttagcgtttgaatcttcacctactttataatctctaccattttcagcatcttcaattgaatctcctacataatcaggccaatataatcctccgccaaatcgtggcacatcattagctccagttgagattatattcttatctttggttaataccgcaccaacctgacgggaaagatctgctgatcgcagagaagcagaaaaagccatgaacatagcgtattcatcaaaggttggcgtgacatatgggttaccaaaaatcagatctaatattctccatatattattgtcggtcctatttttatttccatcataatttataaagaaatctgataactcataagtatctcgattacgctgcccccacttattcccttcattggaatcacgattaatcaattctctggcttttacttcatcaatacatttatcaacgataagatttcttaatctctgagattcactcgtatatacacctatcaagaaaaaaccatttacataaatatcccttagagcattgacttcatccgggtgtttgagagaatttataatatatgccctcctaatagatggtattgatgagaaatgcttcttctcccttcttttatttatttctgccaccgcagccaatgctaatatagaactatcctgactagactctcttaaataattaccctccgacattaaacaacttatcctttcataattatcccttgttgagggaatatctcttaataccgaaatgatttcagaagatattcttatctcctgtacatcatacctgaacgcattaagtttctttgttatagaatctctaattatttccagatccgttcctacagcaccaactaacgcaataacgacctcagaatcaaaatcacaaggcatcatctgatcaccctcaaatagatatgttttatttatatacccgttatctttcaagttgcctctttgttggctgcactctctcaccccggtcacatcgttatctatgctcccggggattcgctcacttgccgccgcgatgcatctcgaaatccattaggtatgttaatcatgttaagtatttctacctattatcgttttactctatttaaaatagccgttaattacatttgtaaaaaacggacaataacattcaaaaaaatataattccgtagctaaatatagactttttatttactataccctgtacattcttatttaaactcttcctctaataccagattaggaaatatgaattaacatcacataatttaccctttttcataaattcacctcccttctattataataaggactaaattgtatctctaattagaggaaaggtgtatccttgacgtatccaggacgatgagaatataaaccaaaaacaatccatgaagcaattaaaatatcaaaatcatgtcgaacaggcagaacattatcataatagttctgcctgaaaataaatagattagatagaaaatatctttatgatctcaatctaattttcttatccttccagaaaaaacggttcttaattcatatttacaaccctatcaattaaactaaacgggtatgaattctatcttccaacaacgtgcatcattgacataaagacgaggctccttcgtatcagggttaaattcaaaatcaataataaattcaatgctgggtaagaaataactattctcgtaaacccaccttaacgcctcttttttccctggcaagataaccgcatcaatataaagttcatcaccggatacttcaatacttagcattgattctgtttcgtgattataatagcgacctgataatcgctgaatatcaatatcacctttatcagtcatctttttcaaataaaaaacattgtcattttcatcaatctgttccagtgcgataacacggttattttcaatgatcggtctgaaccggatatctccccccttctcttggaatgttccatcggcgttaaagataatcggattacctttctcgaataaattacctaataaatagcaatcttccttggtaataatataaggatagggatcagcccccttgaacataccggtaatatcaatatcactggttcggcaatgctctggctcagccatgtcagtgttaaataatacattaagacattgattagtaaactcaacactattaatacctgttgcagcagtaatcacaacacctaatttagcatcaggtaaaacacaaacctcagctttaaaaccatcataggcaccatcgtgccgtattatcttttgaccttcacgttggctgatcatcaaaccgtaagcataattgttacgattgccattggctaaatttggcatacgagataaatgaggcaacatatcccgaacaatcgatggtgaataaaatgctttcatccaacggcataaatcactcactgtagaacgaagccccgcactacctatagttgaatcgttatgatccgatcttatccattgatttgaatctgcgttatagacataacctatcgcccggtcagagataacctcagtaacatcatcatagaaagaggtattattcatctttaatggaataaaaatattttctttcgcatattctcttaacgatttacccgaaaccactttgatgatttctgccaataaattatagcccatattggtatagctaaaatattccccaggcgtgaaattaagcttttgttgccgttgaatcagttttcttaataaatctatactgcggtggtcaaaatctgagtttttacccgccaaaccataaggggcatatttatcccgtaacccactggtatgatgaataagatgctcaatggtaatatcagagaaatgtgccgggaaataatccacatattttccaactttatccttgacattgatctttccttctttttccaacaaagcaatacaaaaagcggtgaattgttttgaaacactcgccatatagaacttcgtattgggggttatggcaactgcatgttcaatgctagcttgcccgatatagcgcttataaatagtttcatttccgtgggtaacagcaaccgcgagggcaccgccatttttcttattttcaatatcaattaaattgtctattttattaacaagagacttaatgttatctctagatatcgtcaattccatcatgaatttccttatttaaggttataagacagaacataaatataatagttctgtctggaacaaagtgtatctaatctggtttatcactttataaattaaactgcgacaaattctaccctccagcaacccccatcattaatatagagatgcggtttatttgtatcagaattcaattcaaaatcgataacaaattcagtgcccggggagaaatagctattaccgtaaacccgccgtaaaactcctttgttctcagggtaagtaaccccatcaatataaattccatctccagaagcggaaatagtcatcgttgcttctatttcatgactataataattccctgacaatcgctgaatatcaataccaccattatcagtcatctttttaaaataaaaaacattgccatcttcatcagtctgttccagtgagacaacattatcattttcaatgataggtttaaatcgggttttacttccttgctgttggaatgaaccgtcagggttaaaagtaatcgggtcgccttttccgaataaacttcccaataaataacaatcctccttggtaataatataaggataaggctctgcccctcggaaaataccggtaatatcaatatcactagttagacaatgtggtttttccggttcaactatattcgagttaaacaacacatcaagacactgttcaatccattgaatgacattaatatttgttgcagaggtaatagcgatacctaatttagcatcaggtaaaatacaaacatcagatttgaaaccagcataagaaccatcatgttgtattattttttgcccttctcgttggctgataatcaagccgtaagcataattattgtgattgccattagttaaatctggtgtacgagataattgaggcaacagctcctgaacaatcgatggtgaataaaatgctctgatccaacgacacaaatcattcactgtagaataaagccctgtgccacctaccacagaaccattgagatcatatcttgcccaccggttcggttccttgctataagtgtaacccatcgcccgatcaaaaataatctctgtgacatcatcatagaaagtagtatctttcatctttagcggagcgaaaatattttcttctgtatattccctcaatgatttacctgaaaccacactgactatttccgccagcaaataatagccagtgttgctataagcataatattcgctaggtgtaaaattaagtgttcgttgccgctgcgtcagttttcttatcaaatcaatatcatggtaatcaaaacgcgagtttttacctgccagacgataaagtaaagattcatcccgtaatccactggtatgatgaataagatgttcaatagtaatatcagagaattctaccgggaaataatccagatattgcccgactttatccttgacgctaagctttccttctttctctaataaggctatgcaaaaagcggtgaattgttttgaaacactcgctaaatagaatttagtattaggttttgcagtcacagcatgttcaatattagcctttccgatatggcgctgataaatcgttttattaccgtgggtcacagcaatagcaagagcgccaccctttttcttattttcaatatcaaccaattcatctattttcttgagaaacaatttaactttatctgtagatatagtagattccatcatgaacttccttattttaaggttataaaacagaacatatatatgacctaatagcaatatcatatacgagtaattactgtaaaacgtaaatagcaaatcatccaagtgataatcatcatcatttaatgtatggaaggcaatataaagtcactaccggagctaatgttgataaaaaacagacagaacataaatataatagttctgcctggagaaaaatgcatctaatagaaaatatatttaacccctcaatagcattaattccatccggctataacaatgccattattcattctgatttatcactttataaattaaactacaacgaattctatcttccaacaacgtgaattactgatatagagatgaggtttattagtttcagtatctaattcaaaatcgataatcagttcagtgctgggagaaaaataactattcccataaatccgccgtaagacttcctttttaccaatataaacaaccccatcaatataaatcccatcgccagaagcggaaaccgtgatcgttgcttctgtttcatgactataataacgccctgacaatcgctgaatatcgacactaccgtcatcaactctctttttaagataaaaaacattgccattttcatcaatctgttctaatgcaatgacactgccattttcaatgatgggtctgaaccggattttaccgcctttctcttggaatgtaccatcagcgttaaaaataatcgggttacctttttcaaataaattacctaataaataagtctcttccttggtaataatataaggataaggctccaccccccggaaaataccggtaatatcgatatcactggttaagcaatgcggttcttctggcttaatatcggtgtcaaataagatatcaatatactgctccacccatgtagaaacatcaacacctgttgcagcggtaatcgcgataccgaatttagcatccggtaaaatacaaacatgagatttaaaacccgtataagaaccaccatgttgtattatcttttgcccttcgcgttggctgataataaaaccgtaagcataattattacgattaccattggttaaattcagggtacgggataattgaggcaacagatcctgaacaatggatggtgaataaaatgctctgatccaacgacacaaatcatttaccgtagaatgaagccctgaaccaccgaccaccgtatcgttaagatcatctcttatccactgatgagagttcttgttataagtgtagcccattgcccgatcaggaataatctcggttatgtcatcatagaaaaaggtgtctttcatctttaatggggcaaaaacattttcttctgcatattcttttaatgatttaccagaaaccactctaactatttccgccagcaaattatagcccgtattgctatagagatgatattcccccggcgtaaagttaagcgcttgttgccgttgagtcagttttctgactaaatcaatatggcggtggtcaaagtccgaatttttacctgccaactcataaagtaaaaactcatcccgtaatccactggtatggtgaataagatgctcaatagtaatatcagaaaattccgtggggaaataatccaaatattgtccaactttatccttgacgcaaagctttcctgctttttccagcaaagcaatacaaaaagccgcgaattgttttgaaacactcgccaaatagaatttagtattaggctttacagcaacagcatgttcaatgctaacttttccgatatgacgctgataaatgattttattgccgtgggttaccaccaacagcgagagcgccccccttttttttattctcaatattaaccaattcatctattttcttgagaaataatttaatattatctgtggctatagtagattccatcatgaacttccttatttaaggttatcaaacaaaatatatatatacggcctgacagcaatacatatgcgggcagtactgtaagacgtaaacatgaaatatccaagtgataatgattatcatttaatgtgtgaatggcaatataaagtaactatgggagcggatgtttacaaaaaacagacagaacataaatataataattctgtctggaacaaagtacatctaataatagaaagtatttttaatccctcaatagcattaatgctatcctgctagtgaaactctattctaaatttatatttatacccgtcatctttcaagttgcctctttgttggctgcattcactcaccccggtcacatagttatctatgctcccggggattcgttctcttgccgtcgcgatccatcttgaaatccatagggtatattaactagccaattaaactgcaacaaattccacattcaagcaacgtgaattaccaatataaatacaatatttatttgtttcaggatcaaactcaaaatcaataacagattcagtactggatgagaaataactattgccataaatatgtcgcatagcctctttttttacaggatggataatcccatcaatataaatatcatcaccagatgatataatattaattattgcctctgtttcgtgactataatagcgccctgacaataaattaatatcgacactactttcattgttcatctttttcaaataaaaaacattaccattttcatcaatatgctccagtgcgataacactgtcattttcaataacgggtctgaactgaattttacttcctttctcctggaatgtaccgtcagagttaaaaataatcggattaccttttttaaataaatcacctaaaaaataaatatcttctttggtaataatataaggataaggctctatcccccggaaaataccggtgatatcaatatcactggttaggcaatatggtttttccggttcaatatgggtgttaaacaagatatccatataattatccgtccattgatcaacatcagcatcagttgcagaagtcatcgccatacctaatttagcatccggtaaaatacaaatattcgctcgaaagccagcaaaggtaccattatgttgtattatcctttgcccttcacgttgttcgataatcaaaccgtaagcataattattacgattgccattggttaaatctggtgtacgggataattgaggcagtagctcctgaacaatcgatggcgaataaaacgctctagcccaacgacataaatcattcacggtggagtgaaccgctgcactacccatcacagaattgttgatatcgcttcttatccactgttgcgcattctcattataagtgtaacccatcgcccgattagagataatctcggttatatcatcacagataacggtatctttcatctttaatggaacgaaaatattttcttctgcatagtctcttaacgacttacctgaaaccacattgataatttcccccaataaataatagcccgtattgctataaatataatattctccagcaggggcgttaaatgtctgttgtcgttgaaccagtttttccatcaaatcagcattgcagtagtcaaaacttgagtttttacctaccaaactataaagtaaaaatatatcccgtaatccgctggtgtgatgaataagatgctcaatagtaatatcagcgaaatgttcgggtaaataatccaaatattgtctgattttatccttaacgttgagctttccttctttctccagcaaagctatgcaaaaagccgtgaattgttttgaagtactcgccaaatagaatttagtattaggctgtatagcaacagcatgttcaatgctagcttgcccgatatgacgctgataaattatcttatcatcgtggataatagcgactgcgagagctccaccttttttttcattttcaatattaaccagctcatctattttattgataaacaactgaatattatctttagatatcatcgattccatcatgaatttccctatttaaggttacaaaacagaacatataccctatggatttcaagatgcatcgcggcggcaaaggagcgaatccccgggagcatagcaaactatgtgaccggggtgagtgagtgcagccaacaaagaagcaacttgaaagatgacgggtatatatatatacaacttgatagcagtacatatatgggcagtactgtaagacgtaaacaagaaatatccaagtaataatgactatcatttaatgtgtgaatgacaatataaagtaactgcggatgaaaattaaaattatctaaattttataaacattattttctttcagaaatcattttcgatctaatatttacaaaaacaggcagaacataaatataaccgttctgcctagaatgaagtgtatctaatagaaaagatctccatactctcacaatagcatcaatcctatcttgctagcaaaatactattctaaatttgtatttactaacctgtccattaaactgcaatgaattccaaattcaagcaacgagaattactgatatagagaagacatgtatttttatctggatcaaattcaaaatcaataataagattagttcctggagataagtaactatttccataaatatgccgcaaaacctctttttttacaggatagacaatcccataaatataaataccttcaccatacggtataatattaactatcgcctctgtttcattactataatagcgccctgacaataactgaatatcaataataccttcattgttcattttttttaaaaaaaacattgccattttcattaatctgttccagtgcgataacattgttattttcaatgataggtctgaaccgggttttaccttctttcgcttggaatgtaccgtcagagttaaaagtaatcggatttcctcttttttattctcaatatcaactaattcatctattttcttgagaaagaatttaatattatctgtggatattgttagtttcatcattaatctcctcatatttataaaaaacagacagaacataaatataatagttctgtctggaacaaggttcatctaatataaaatatctttaggccctcaataacattcattctatcctgctaacgaaacgctgatctaaatttccacgtactaacctgtgaattaaactgcaacaaattccacattcaagcaacgtgcattgccgatataaagacgagatttattggtatcaggatcaaattcaaaatcaataacaaactcagcactgggtgagaaataactattgccataaatatgtcgcaaagcctctttttttacaggatggataatcccatcgatataaagatcatcaccagatgatataatattaattatcgcctctgtttcgtgactataatagcgccctgacaataactgaatatcgacactatcttcattgttcatctttttcaaataaaaaacattaccattttcatcaatatgctccagtgcgataacactgtcattttcaatgacgggcctgaacttaattttacctccttgctcctggaatgtaccgtcagagttaaaaataattgggttaccttttgtaaataaattacctaaaaaataaacatcttctttggtaataatataaggataaggctctattcctcggaaaataccggtgatatcaacatcactggttaggcaatgtggtttttccggttcaagatgggtgttaaacaagatatccatatacttatccgtccatttaccaacatcaacatcgcttgcagccgtcatcgctatacctaatttagcatccggtagaatacaaatattcgctcgaaagccggcataggtaccactgtgttgtattatcctttgcccttcacgttggtcgataataaaaccgtaagcataattgttgcgattgccattggttaaattcggggtacgggataattgaggcagtagatcctgaacaattgatggcgaataaaacgccctagcccaacgacataaatcattcacggtggagtgaaccgctgcactaccgatcacagaattgttaatatcacttcttatccactgttgcgaattttgattataagtgtaacccatcgcccgattagagataatctcggttatatcatcacagataatggtatctttcatctctaatggagcgaaaatattttcttctgcatatttcttccacgacttacctgaaactatgctgacgatttcccctagcaaataatagcccgtgttgctataaatataatactccccaataggagcgttaaatgtctgttgtcgttggatcaattttctcactaaatcagcatgacagtagtcaaaacttgagtttttacctgccaaattataaagtaaaaatatatcccgtaacccactagtgtgatgaataagatgctcaatggtaatatcagagaaatgcgcgggtaaataatcaaaatattgtttgactttatctttgacgttaagctttccttctttctccagcaaggctatgcaaaaagccgtgaattgttttgaggcactcgccaaatagaatttagtattaggctgtatagcaacagcatgttcaatactagcttgtccgatatgacgctgataaattatcttatcatcgtggataatagcaactgcaagagctcccccttttttttcattttcaatattaaccagttcatctattttcttgataaataactgaatattatctttagatatcatcgattccatcattaatttcctaataatttaatgttatacaaatagagcacatatgcaatctggtaatacgatatatgcgggcagtactgtaagacggaaataaccaacatccaagtaataacgattatcatttaatatatataccctatggatttcaagatgcatcgcgacggcaagggagtgaatccccgggagcataggtaactatgtgaccggggtgagcgagtgcagccaacaaagaggcaacttgaaagataacggatataaagagaaacagaaagtaactgccgttactcatcggaataggtgaattagtgctagtgctgatttcgacattcataaaaaagcaattaccggacttattgtaagcccggtaatccagatttattcagtggcaagggaacctttctttgtacgaaagactaatacaagtcctgataaaatggcggccattcccaacaaacttagagcaggtaacgaatttcctaaaaataaataatccattacagcggttacaccaggaacgagataaaaaagactggttacattcactaaattacctgcctgaatgagtcggtaaagtaataattgagccacaacagagataactagccctaaccataataatgaaataataaagccaggcaccagttgaaattcaaaaggttggaaaggaacaaacaataaacaaagtagtagactaacactatattgcaggggtaaaaccgcagaaggagcttgatgaattcgtttctgtaaaatcgcaccaatactcatacaagccaatgctgctaaggcaaaagtaataccagcaatagaaaaccgagacagcaccaagctttgatacaccactaataccaagcccaataatgctaataacaaacccgctaaacgtacaaccgagaaacgacgttcgatcaccaacaatgtgataatcggttgaatccccatcactgtagccaaaacgccaggcgtgatcccgttatccaaagcaaaaaagtaacaaatagaatagccgccaattaacaaaacaccggtacccgcaatctgtttgcgagtaccatgttcaggtaaataatagcccttatgcctgaataataatcctagaaatatcaaaaaaataagtgcaatagcaaaacgcatcgtaagaatggcaaatgcggtactatgatcgagtccccaccgagaaaaaatcgcaccactgctccacaataaaacaaaaatcaaagtcgaactataagagatccattgagctttagaaatcatagagaatccacaccctgtcttacattttatgtacccaagtcaacgcagctagccaaatctgacaccgattaaatatcaaccctctctcagaggcaatcatattacacgattatggataaatatctgtaagcagttttcaatctccatgagcacgttgcgttaggtccaccaaataagatcaccattttgctgtaatcccataaaacaggtcaccagtaaacgccgttctggtgcagagatagtattgccattcagtaccgcatggaccaagttcccattcagtaataccaaatctcccgcctcaatattaatcaccatacttgcatgatcttccaataattccgacgggtatggaaaaccactgtaagttaaaccaagggcactacgcgattggtcgtcaggttgaatgttccatacttttaattgtccgccattttgaggaacgtcagcgtaaaaatttaccgccataacacgattaatctgttggatctcaaaatcactctggcgcggatcacttaactgcgcaagatcatcatgaggtaataaaaggaattcgccaaaattattccaatacacaatttttacattacccgccgcaacaccatgatacattgcaggacgcattacccgtaggttattactactaaaatgaactatttgatcaataaaacgatcaatgggattgatcgtatcttgaaacacctcattaattgctgaacggaaattttctgcttcttcaatatattggcgggtatctttttcaatatgagatgctccaatgaagtacccctcaacaccttcaataccttctccgtaacgaggagtccgtgccgaagaacgccaaaagttctcaattattttcctgctttgttctgacggaagaaaattacgaacccgacaagctgcaaggtggccatccaaaagggcagaaagtgcgtgtacagatatattgtttgatgtttcgtatatcataaactccgattctgccagtgttgctcctctaatctcgaatttttcttgcattatagtagattcacccattatttttgatttatacccgtcatctttcaagttgcctctttgttggctgcactcactcaccccggtcacatagttacctatgctcccggggattcgttcccttgccgtcgcgatgcatcttgaaatccatagggtatatagatctatgaagtaaagatctatgtctgtgtaaaaaacccagtattgcaggtaccggactaataactctcttctgtgcagaaagctgagtcgaatatttcctacgtaaatcaggtaatagactccaatgcgtgtttcctgagatatgatgttcttggtgatagccatcattaaacatcaaaaaattatagacacgaccatagtaactcactgaatttgcaaatttatttcccggcaatgcaccataatgctcataataattttgtatattaaccagaacaaaggcaaaatagagagaaggtagatagcaaaataagctccattcccaagaccaagtgaataagataatcacccacatcgcttgaaataatctatccagtctcaattgccacagctctttcattctcctaactttcactcttgaaagaagtttttcatatcctttatccgctttactaagcggtttatgccagataaatatagcccataacatacgcattaaactgttataaagagtaaatattccaccaatggtagaataattccaaagagtattatgttcccctctttcttttccattgataaaggttgaagaggtatcctgcggcccactttcgccgactccccggtcgttattatatttgtggtgattacgaacatgggacaaatgataagactgtatagattgcccaatattcattgaattcaatatagacacaaacatattcaaggcattagaaacaaaccaaggagtatgggtaaaaaaatgcgagatcactactatgttgtaagttgtcatcaatgtaaggagaataacatgagtcaaccaccccataatagtgaaaccattccaatacacaactagcgtaatagtggctaccgtatgcaagatacttaatgcaaacattactgcatcccaaggggaatatctccagatagccatcattatttattcctagtcaagataagactgtaaagttccgcgccgtcttacatccactgttgcacaatggaaggaaccgccgaacgtattaaaattcctgaaattacatggaattggcgtaaagccccagcgtttcatcgcagcaatcattggttcatcctgcttttcaacaatcacgcgctgttcatccaacatcagaatattcatgttgatccatttactggtggtatacagaggatggtcatcaggaataaccggtttcggcgcatgtaatacatcccagttcctaaatagttcaggaatttttaatactttttctgggtgaattaacagttttcctggcgccataggaacaaaggtggcatcaatgtgcatagggctatcatcgttaaattcaaaaacatgaatacgatattcatcacctatatgacgacgaagccattcaataccaaattcgtttgtaacatggctcttttgagcaataatgtctcgcccacaccgaataaaatccgcagcatcaaaagttggttcaaattcagttatagcaaggggaacacgctccttactattaggccgatgccattcgaaattatattgttcctcagtcaactgcggctttggcccagcgctccattttgcccctttcttaaagtaatctttaagtaaagtcttatatgccgctgtctcaaaataacgggaacgccatgctagcgggcattcaataatatcatttccaataactaacagcacatcgcgaggcatggcacaataaaaccctgtactactccagcctggtgcaccaaatacttgagattggtcttgcggctccggacgacgtactgtcacaccttcaccttcaagaatatggacaaactcttctaactctctagatgctgcatcaatttgctcttgcggaaatgaccgacctgcatatcgatgaaaattatcaacttgattcggtggtaatattggctctgtcgccatatgccaaccgggaaatctggcaccatcgactacaccgacaataacctcctcaagtggatcccattcattaaaagaacaaaccggggaagaattcttactattacaatctgttaaatttgaatcaagcatgtcgtctcctgatattttaatattatgtcgctttaaaactataacaactgtattaattgcgaccctattttcatcaatataaacctcttagaaaaaattcaatttcaatatgtcatcatacataatattatagatttacatttctttccgtttaaaaagtcaaattaactatgattttttataactaacaaatccaacaacaaatcataatattggctatttaaaacagtgaaaaactgttataaaatttattttttcatcataaaactttcaattaaggtaataatataaaaaacaactttatagtttcaccgtagttttataacgctaaaataagaatataaatttgtctgcgagcaataatatatggacatttgaatttgtaaagaaattaaatttaagcattgtaaaatagagttaatgtgattgtttgctatataattattgactttataaatattaacacagataaataaaagcttatttatagtaacattgtttttttaattctataataatgaacctcaatataaacacaggcagaacagtaatattaccattctgcctgtagttaagtgtatttaatagaaagtacatttaggatttgaataaaaccagtttcatcatacaaataaacattacatttaatttcaattagtaataatactgtatttgataactgattatattgcttaaatcaaatccagttattctaagaaatattttaattcacgcacccatttagaaatttaacaaatacttcttaaatttcaacacttactatatattttatcttagtaagtttactttttgcgacttttacttttacatctaatttttcatgaagaacacgtaaaagagaaagatagagcagcacaatcttatctttatctttatcatcaactagtaatagatgaaaatcatcaactacgcctaaaatattcagactaacaatgactgagctgggtgacagaatatcaatattgaccttctctactttacccactttaagatcatcatcgacaatcagctcttcatttaacaaaatatctttcttaattatcatgacataaactccaaaatttaatctaaccgattgataaataacttatatcattcaaaaatgaatacaataagccatttatcttgcccacacaaaacagtaaccattttcactagaaaacaaggtgtttatcaggaatttatccagtacttagataacatatacagcattttcaatgccatattgacgctttatctaatacatataactatagatgcgattaatgtattgtcaataaaataaaaaaataaatttaattaatttaaaatcaatattttattacccaataaaaatagaaaagatattacatcctgtaatgagcaggatatttttagtaattttttctagaaaatataatgacagcgataaatgataatgagaaataaacagatatttaccttctatgctacaaaaggtaaaaccgaagaaatcatctcagaagcaacaaataattcataacgttttagtactatattttctggaaataacaagcggtatattaatcaagtgatgatttatagtaaatattataattacatcccattcatctattataataacaagaatataaaataaatctcaagcaattatattattaaatttattacaaatcattaatcatcaacttgttatacccaatagatttcaagatgcatcgcgacggcaagggagcgaatccccgggagcatagctaacgatgtgactggggtgagtgagtgcagccaacaaagaggcaacttgaaagatgacggatatatttatatatatttttcattgccaaatgagatatcgaattaataacagttaatatgtaaaaataatactaaaaaaaacgtggtgtcaattttaactataccacgttttattactaaatttaatatcactttacaatatagaaaaaccaccgacgaattaatactactttagataacagacttttatccataatctctggacaaccagttctttatatcctcaacaataggagtaatttgcaaaacaccttcactatttctaaatccatgacttaggccagggtattgataaaaggtaatattctctttctttaattgctcttccattttcatcgctgcactagggttaactgaattatcatttagtgtttgaataatcagaataggtcttttagtctgacttaacactttatattgatcaataccaagtgagactctccaccaattagcaccatgattactcatttctatatgactcatattatccccggcagctattttttgctgaaaatccctaaatcctttaatctcttcattgagatattctggtggcgcttcactttttatactatgaataacatcatcagcgaaataccgacctccaccattcagtgacacagttctatcaatataattgacttgtgatgtaattaaattagcaaccactgccccttcacttccacccaaaataatgatcttgttatatttattctgatgtttcagataatcaatgatctgaatataatccttaactcgctgttctggcgtatccaacctaatataagctttaggacaatctgaacgctcaacaacatcagaccaagggagtgatgcattaatgccatacttttccacagtcagaacatcactatcgggataaatatcgctgaatgtattattcacaaacttattattagcgatactattacaatcagagccctgtatcagcaccaatagattcttaccacctctttgcttaagatagtaagttatttcactaccatcatgacggaaaaactgtttatgtgcatttgtatttgagtaagcaaaacctatataacatgaaaaaagcagagcaaatgtcaaaattctctgtcgtaaattaaaataatatgctttcattaatctctcctttaattgacatatacaaagaccacaaattgacgatattgttcctgtcagaaaaaattttaaaatttaaaaacaaggttcagagttttttatccaaagtgctaactaaaacacccatacctttggagagaagaaatgcaaaccactttatccacagaaattacattacccgataattatcatacccacgattttttcgctcttcatcaaagggataaacaaaatatcgctgaaattgtggaacagaataaagttcaaaaagggatgatgtgggatgacaaacctgcggaattaaccatagcgattaatgccaaaaccgcacatatacaacttaagattgatggtgacacaacaggccctgatgagcgcttatctactttagcatcacatatgccagggcttctacagcctgttcatctatttgagtgtttatataaaaggcacccagttatcggttcacttattgccagacaatcaggtttaagaatttatcaatcggccacaccgtttgaagcattaagttgggcggttatcggccaacagatcagcgtcagtgcagccatctctattcgcaggagatttattcaggcaatgggcgttcagcactcttccgggctatggtgctttccaaccgccagacaaattatcaaccattcagaagatgaattacgccaatgcggattttccgtcagcaaagccaaggcattactccgcttaagtcaattaattgaatctggtgaattaacattagcaatctctaatagtgagacagatattcagcaattgatagataatctactcgctataaaaggcattggtatgtggacaattaactattccctgttacgaggatttaactatttaaatggctcattgcatggcgacgtcgcagtaagacgtaatatccaaagattattcaatcaaaatgaaaaagtttccgcagaacaagcagaaaaatggttggcagatttcgccccctggaaagccctattagccgcacatttatggcaacaagaatcaagtgcaggatattgatgttattgttaattttcatttccttagctggtatcgtgtattgttgctatatacccgctatccttcaagttgcctctttgttggctgcactcgctcaccccggtcacatcgttatctatgctcccggggattcactcccttgccgtcgcgatgcatcttgaaatccatagggtatagaacgattaaccttgaaaacaacttttttcgtgaatataaattctatgataagaccgacaaagtttccaataaatcaaattgttatgagtctattctcatttcttcttttttagatgatttattaaaagaaaaaatttctaatactcttaaatgtactactgaaaatcctatcgataaaaaaggaggtgttccccccttaatcagcgcacacttagcaaacaagttttaacttaaggtaaacaatactttgaaactctgccggaattttttctttaatatctgataatatttttttgtcggccccgatagcttctaaaagctcattaataatagattctagtttctccgttctatcccattggactttataagctgccgaatttatcttttgttctattctctgtaactgtttattttctttatatatatatttcattctaataatattcacctcgttatctacattttctttataggtgataatcatatgaatatcattagatttcttaatggtttcaatgctatcgtattcactctcaaaaatagcagttatgagctcatcaggctgaacacctttcactaagcaaaaggctaccattctttctataatctcgtttacttttaatgagtcgatcatcgtatcaccctcttaacttcttcaagtattcccgctaatgcccctattgattttagcaatgttttattatcccgatccttaaccgccccatatatcttggataatttgctattaataaaacgaacaacaataccatcattaacatctgttgtctttagattaggaatacagcgattaaaaacatgataaagctcagagcctttttcatcaataccattttcaatcaaaagattagcaacctcatcctgtattcgagtactcaagatttgtcgcatcatttttcttgcttgcgcaggccgcttctctatcaactcagggtctattaatttagcagcttcacgaatttctctctctacaagagaatctttcaaattttcaagcacatctaatggtagatctactcccgattgaataattttatttatattttcggatactaatgcatttatctccgctctctttctttcaaataattcattaaaatctatatcatcaagatatgaatctttattactaataaaagccccctcactatttacactagctaatgaattttctctctcaatatattctctatcactaaatgtatattcccggatacttcctcttttagctctatcaacttccttttgaaatacattccacattgtgttgagtccaatttcttcgtgaaatattaccaatccattattatcaatttcaaaagctgttatttcatcatcaggtattgcacgcaatattctaccaaccacttgtgcaaacgcattaatacttctatatggcctaaatatagccagaatacttaagtatttatgatcataaccctccatcaacatgttaactgaaattacgacatcacattgatgattttcaatatttctaaaagctctacgtaattcatctaaggacatttcactatgaacaataatagaatttaatcccttttctttataccaatgatataaatcttctgcgtgagaaatactacaacctacagctaatattttatggggaactttactagataatttctttaactcatttaattttaatatgctatattcaataacatcttttgagcattcctcagacagagcgacacttttctctatccattctttatctttaaatgccaatacctcttcctttgataatttaacttcctcattttcttttatagaaaaatacaactcatgtgcattaaccgtctcttttcttaaccacttcacataattatttttcataacctctgaaagaggagtttcatgtattttttctccaggaatttcttgattatcacctcgatatggtgttcctgtaacatgaagtatcttagcctcgcggaaatatcccaaaacttcacgccaactttgggcaggagcatggtgagcctcatcaataataataaaatcaaaaaaatcctgtggaactctacttattagacttgtctcacgcttacttgatactcgatgtatattagagtaaacaatatgactagcaaataaatgctcatcactgatatcttgaagatattcattcaccacaggaatatctttactattaaatataacatcacaattcacccagaaattgtcctctaacacctcttgagtttttcgtatactatctttagtaacaagcccaggagttatgatgagaactcttttatttgaaactccatatggcgcaatagaaattaaaccacttttccctgtacctgtcggtagtactactaatgcttctttattatctggctgattaaaatactctctaatcttgatgtatgcctcaatctgaggcgttcttaatttcttatttccctcaatattaactgctgtatcaaaaaaataagacatacatattccttttactctaccaattatataatcactattaaacccatattcatgcaaaatagtctatgtagtatggacaaaatcttgactaatagcacgaaatttataacttggtcgctcaataaattacttttcattttttcctaattgtttcatttacgctatctatttcaatgaaaacacaataatatttcacagtatataatcctatgaataatttaattatctaataataacccgaattctggataagaaattgacgggaatcctgttctaggaacaaagttttagtgaacgcctaaaacagctccggggaggagcaggtcatggataagtgagttgaaattttctgtaatgtcgatgatttttgcagctttttaataccccagtaggaaccgttttgtttcgataacggataccgtctgcgccatcggtaagattacatgtatcccaatgaaataatgaccatttttatcctctttaacatgtcacattactgtaattttaacgctttctatttggaacacctctggaaatatcatcgttttcggaacgatgcagggttcctctgaacctgctgctcattaacggaagaaaataaatagtaaattttgtcttctactgatgggtctcctttcatttttatgacaattttgggagcctctctgggaacacgataataagctataagccctttttcctgattttcataatcaaaatcgagaaccaagattttttcatcccctgaatccggataataatgatactcttcgaaataaaccacttgcccatccttaacaaagataatcttggaaaagatatcagtcctttcctttaactccgcaccaatgacagacttaatttcatcaagattccaaccactatcaataacatacaaagtgtcccatttaaacggcgtaattttgctgatgttaaccaagcagtctgtgttttgctggcaatgtttatcagcataatcaaacatactcttaacaatgctaaactgtcggttactattgaacataaaaaaaactatcagcaacgtgcatgaaaaaaaaatgattttattttttctgctgttccaattacatcgccaatagttactcaggtgaaaagccatcttcatttcctctttcaaataccgagttcatataagaaaactgctcatcggtgattttttctttgacaatctcaaaccccatcgcatttttcttggcaacatacagtccctctttatgaaagcgattcaacactgccttggcctgcgctttcattgacgagttcctgctctgtagggcaatcctacgccctatctggttattgagtaaatcaattgtctgatctgcgtccttaagggcagcaaactgccggatgttaagatctataatagggcaattctctttgttatatttatccttataagtattaactatatcagcaaagccaaagcattactccgcttaagccaattaattgagtctggtgaattaacattagcaatctctaatgatgagcaagatattcagcaattaacagataatctactcactataaaaggcattggtatgtgaacaattaattattccctgttacggggattcaactatttaaatggctcattgcatggcgacgttgcagtaagacgtaatatccaaagattattcaatcaaaatgaaaaagtttccgcagaacaagcagaaaaatggttggcagatttcgccccttggaaagccctattagccgcacatttatggcgataagaatcaagtgcagggtattgatgttgttgttagttttcatttccttagctggtatggcggaatgctaggttcactccgatccggaaagctgtctggtgaagttacgtaactacaccgaattgatggtacgcctgttgcatttaaatcatcaaattgatccatgcctgttcctcataaattctcttttttcttggtcgaaatttttgatcttggaacaggcattgagttacatcttttatccagagttcaggttatttatgtaaatcatatttcgcaataaatacactttctccggtaatagtcagcgggatcgattctaggccaataccctcacacggtccttctgtacaatgaccatcatgaaaattaaatctggcataatgaatcgaacacataaactgactgcggtccgaggtaaatatctcgccggagcgaacattcaaaggcacatcaaaatgtgggcaaacattcatatatgcccgtagttgacctgcatcattgtagataaacatgcgaaactgcgtttttctgtgtttcccaaagcaaaattccatcactccgccagatgtaatatcaaaaacagaacacaggtatgttcctggcagaggcgcatttttttcctgataccagactttcattttactcctcccgtggagcaccaatccccaacagccaagggcgaacgataatttctccataccctcgccagcatgtaagggtcatcctttaaaaatgcatacacccggtgtgccgggcagatgcgggcacgcagcgtctcccgagcaggtctgtcagtagccaaaacgacaaaatacacggttccttttcctttcagacgcgctcaatcaggatagctatcccttgtcccacgccaatgcacatggtgcaaatggcatatcgcttttgcctcaacgacagttccagcaaggcggtggtaaccagtcgggcaccactcatgcccagcggatgtcccagagctattgcgcctccattaggattcactcgctcatcgtcatccctcacccccaaagcacgcagtgtcgccagcgcctgcgaggcgaaagcttcattgagttccagcaggtctacttcatcaaggctaatccccgttttcaacagaagtttttgcgtggccggagccggaccaaagcccataatgcgtggttccactcccgccgtcgctgctgcaataactttgccgcgcggtgtcaatccatgccgttgcacagcctcagcagaggccaggatcagcgcacaggctccgtcattcacccccgaagcattcccagccgtcactgagcctcctgcacgaaagggagcacgcagttttgccagtccttccagcgttgtctcaggccgcaagtgctcatcctgatcgaccaccagaaactctccccgcttctgtggcacgctgactgaaacgatctccaaactgaaacgccctgataactgggcagccttagctttttgctggctgcgaaaagcaaatagatcctgatcctgacgggagataccaaacgtttcagcaacgttttctgccgtttccggcatggaatccacaccatacagctcggccatttgcggattgataaagcgccagccaatcgtcgtatcgtgcagtccgttagcttcccggctgaatggggtttcagcttttcccatcacaaaaggagcacgggacattgattcaacgccacctgcaatgatgagatcagcttcaccggctttaatcgcccgggcaccgatgctgatggcatccatgccagagccgcacaagcggttgaccgtggtcgccgcaaccgtcaccggcaggccggccaacagtgccgacatacgtgcaacattacggttatcttctcctgcctgattggcacagccataaatcacttcatccaccgccgaccagtccagatcttggtatttttgcagaaaatatttcagcggcactgcccccaagtcatctgcacgaatcttggacaatacgccgccatagcgcccgatcggcgtacgaatcgcatcacaaataaagacttctctcatcatcatggttcctaaatgaagatttctttctgacagaaataagtgccgcagtaattggctttattctgggcgaatcccccagaacgctttttctaataattccctgactgccatacagtcaaccggacgcggattataataaggatcagttgtggcaatcttcgctgctttatccagatctttttcctgcatcccgatatctttcagtgccacgggcgcaccaattgcttttgccagatcatacaatccagcggctgcatcctgcgcttttacccccagcgcacgccctatagcctgcattgcctgcggggcatacgtctggttgaacccggttgcctgaggaataatcacggtatggacttgcgcatgcggcagattgaaacttcctcccagcgtatggcagagcttgtggtgaatagccatccctacagaacccagtacgctgccggacagccatgctccatacaatgcctgcgcacgtgcattgatatcttctgggcgtatcacaacttcaggcaggcttaagcgcaatgccctgatcccttcttccgccatcatggatgtgatcggattgtgattctgtgaatacaatccttccacacagtgggcaatcgcattcatgccgctgggaccggagataaaagctggcaggctgagggtcaattgaggatcataaatcacggtctttggcaatacattcacatcgcgcccggtggttttaatcccgtcccgggttataccccagaccggcgtcatttctgagccagcataagtcgtagggatcgtcagaatcggtagtgcggtttgcagggctatcgcctttgccaatccgactgtcgagccgccaccaattgccacgcaaccgtcaacgcgcaactcgtccacaacgcgcatgacatccgctactgtttctgctgggacatgcatgacggctttatcataaataccagcagcaatatcgcctaatatcgactgcacatcagttgccagattaagctgctgtggcgttgagatcaccagagcccgagtgatccccagcaattgcgcctccgcttttgtttcagcgattttaccggcaccgaagataactctgccgggcaaagcttggtaaataaaattcatcatgatgccacttctgtatgcgcacgctctgtacgctcattgagatcccgtaatactttcagttcctgttctgtgggcggttgcgtcgtgtttaatactgaggctatccgcaacgaccaaccagtattctccagaacctgctctgtcgtgacaccggggtgaaggtaagtcataaccagctctttggtcaccggatcgggctccagaatccccaaatcggtaatgacagcccgaggccctccattggtcaggtcaagcttttcacgcgaatctccgccttgcaggtaacctggtgaggtgatgaaatccatgtgttcaacaaaagaacggctgttttgcttcagaatgatcaatacttccttgcagttagtgctgatttccggtgcaccgcccgcgccgggcaaacggactgtcggcgagtgataatcgccaatcaccgtggtgttgatattggcgtatttatcaatctgagcggctccgagaaaaccaacatcgatgtgttcaccctgtagccagtaacgaaacatctcaggcaccgaaaccaccacatcagccgtttctgccagttccccatcaccgatggacagaggcagaacgtcaggtttcgtgccgatggtgccggattcatagatcaggacaatatcgggcgtgcgggtcaggcgagccagattggccgctgcgctgggcataccgatccccacaaaacacacctgaccctctttgagcatccgggaagcacaaaccgtcatcatttcagaagatgtataggtattgctcacgctacctctcctttttgctctttctccaagctcagtttgaaggcagcgaaatctgccgtccctagtacgtgtttctccatccagtcgctgaacgtttggcggtcacgggcaatgctgtcccagttctggtagaacgcattgttacgcttatagtaaccctgcgcatatgaaggaaacgccccgccggggatcacgcagatcgcgtcaatcacccatccgggaagtactacctggttcatcgcgggcttgaggacgtcaaccacttcttccaccgtcacgatgactttttgggccgccagtacggcctctttctgtaccccaatgatgccccataacagaacattgccctttctatcagcctgttgggcatgaattatcgtgacatcaggacggatcgcgggtactgctgccagcctctgccccgtaaacggacaatttatctgtttaatcgtcgtcgtgtatttgggaatatcagagccgagatagccacgcaggacggcaaacggcagatttgccgctcccgcatcataggcattggccatatctgcatgggcatgctcttcgatctctagcgtatgaggccagcccttttccaccgcatcgcgcaagcggtgcagcgatcccactccggggtttccgccccaggagaaaattatctttctggcacaccccatgccaataagctggtcgtaaatcacatccggcgtcatgcggatcaatgtcagatcttttttgcgttgccggataatctcatgtcccgcagcaaaggggatcaggtgagtaaatccttccagcgcaaggatattaccgtcctgtaccagttcgcagacagcctgtttcagtgctattatttttgtcatagcgttccccctgatgcgaatttatctctggtaaaaaggcgggatttttgcatcaacattgacccacacagatttcacctgagtatattcacgcatcacttcaaaccccatctcacgaccatagcctgaacgccccacgccaccaaacggactggccgggttgacgcgcttgtagcaattgatccacaccatgccagcatgcatatcacgggcaaacctgtgagcacggctgatgtctttggtccatagccctgaacccagcccatattcggtgctgttggcaatcgccagcgcttcttcatcattcttgaaggtaataaccgtcacaaaggggccgaacacctcctcctgtgcaatgcgatcggaatatttcgccctgacgacggttggttcaatgtaacagccattggcaagagcgggatccgctggcggcttaccgcccagcaggatctcacacccttgtgaacgggcaacgtcgcagtaagccaacacgcgctccctgtgttgcaaagaggtcaccggccccatttccgtctccggtaacaaaggatcgcccagacggatggaaccggccagcgttaggaacttctccagaaaagcatcagcaatactttcatgtaggataatgcgcgatccggcaatacacgcctgcccctgattatgaaagatggcccaagcactgccgccaacggctttggtcagatcggcatcttcaaaaatgatattggcccctttgccgcccaactccaactgtactttcttcaggttacccgctgaggcggcaacaatgctctgcccggtcattgtcgatccggtaaaagcaattttgcccacatcttcatgctccgacaatctcgctccggcactattcccatatcccaccaccacgttaatcacgccaggaggaaagcccacttccatcatcagttcagcaatacgcagcgtactcagaggcgtgatttccgaaggcttgatcacaatcgtgttaccggcagcaagagctggtgccatcttccaactggtaaacatcaaagggaagttccaggggacgatttgacccaccacgccaatgggctcacgtgtggtatagttcagaaaaccttcttctaccggaattacgctgccttcaagtttatctgccattccaccaaaatagcggaaacagtatgccgtgcggggaacatctatattcagcgtatcgcggatcggatgtcctgtatccatagtttccagttgagcgagttctgctgcatgttcttcaattttatcagccagttttagcaacaaagcccctctttcagatgcctgcaacctaccccaagcggggtaggcggcttttgcagcagccactgcacaatccacatcggcctcttttgcttcagcaacccgggtaataagtgagccatcatgaggattcatgacttcaatagtctgaccgtcggacgcatctatccagtcaccgtttatcagcattttgttctgtatacgcatgggtatatcctcaccctgattagaatgtcaccggaaccatcggaatggtaccatccttgatcatgtccatgatttcaggcgaaccattttcccacaccagtaacatggagcgcttgggcgacattccctgatggcgaatatctcctggcatggcagcaatatccccggcacgcatggtgactttcgccagtgggctgctgctcttgccatccttgatatcccaggcaatttcatcagacaactggatgaaccattcggcacggtcattaccgtggtcaataggaagaataaactcttcggtagtcgggcaaaacagactctgacgcaccacggaaaccactgacggattccaggtcatatccgaacgggagagataaccaaacaggttgaacgcatgcagttcaccttcaaagcctggttcagctttcacgacgggctgctcctgatttacatccatgaaagcccggttaaccggatgaccattatcatctgaacgcagcggcgcatcacccggaatgcccaccatgcgtttagccacttcacgtttacgcccgattaaacgatcttcattgccatttttgcgtccccacgccactcccgtttcctgcggtgcagcgaagggatcaaacccggtgttggtccagtcagaaatcatggctttgaaaatcgccatcagctcgtcagatttgaaattctctttataatcacggccagcacgggtccattctttatggaatgaccccatgtacaaatcgacgttaccgtaatgattagtcgtgcccagtacatcatcaaacgcaacagtgccataaaaaaatccccaggcaatatcacgcatcaaagctttgaggtagtcatcgatcggtatcatatgttcccctgtcgggcaactgatgtaggcgaagtactcgcagcgatcaaacgtaaaatggccagcggtaaaagtttgatagcccgtttcggtattatctattgtacattttaaattcgtattcattttttcagccctcagttatgctgggaaaaaccatcaaattcaattaattcaggcagatatcagcccatttctggactgagacatcaccgagaattgactgaatcatcagagttgcaggcttatcagcatggaagcgataagccactttttcaggcaggagggcctggtgcccacgtttgaggtagatacatcccattttttgcccatcgggagtgccattcagcttaacagcgccatctttatcttcatcaatgaccgattcatcagtcagcttgacaaaatgcacctcaacatcataatccatagcaaccacaaattcgtcgtgcgcacaggcaaaccagggcgatgtcccttcggcacgagcgatctcgatggtatagtctaaattgatcgcagcaacgatacggtcgtagggtgcactggttgccgcgatttcatacatgttggaaaaaacgtaacgtttgggatcttcaaccagcgcttggatcccacctttgtgataattatcgattgatgcgaatgctgttttatattgcactaacatgatgttttatctccttaacgaaagtatggattgagaccttgaaatggattttatttttatatcatcaagtcactccgtgttcgcatagagaacaaaaaaatcaccatgcgaacaccaattagatattggaaacgtgttaataaaatgtcaatacctgaagagtcaaaagagttcgttacgtcactggcacgtggtctttctgtgatccaggtctttaatcgagcagcaaataagctgtctttaagtgaggtggccaagctttccgggctgagcagggcaactgcccgacgctttttatttacactcagcgtgttggggtatacagagagtgacgggaaacttttttggctgtcgccaaaagtgctgcaactggggtattcctatttagcatcacagccaatcgtgaacattgttcaaccgtttattgaacaggtcagtaacgaaaccggggaatcctgctcggtttcagtcttagatggttctgaaatcgtctatgtagccagatatatgacacatcatattatgtcagtcaatctgggaattggtacacgcctgcctgctgttgccacctctatgggacgcgttttattagcctataaaacacctgaggagcagcaagcctttctggcaaactatatactggaacgctacactccccatacgttggtagaacgtaatgcattactggggattctgacacaggtgcaggcccaaggatatgcgatagtcaatcaggagcttgaactgggcttaagatccatcgcggttcccattatgaatcaacgtgatcaggttattgcagccattaatgtatccacacagccaacacgcacatccgaatccgtattgctggaaaaaattctgcccagcctgcgtcaggccgccaaatgtatctatgaccgtctgcctgtgtgaccataccttcgccagagatgcagcactgacatcagtgctgctgaatatgcaagatccagcgcaagcaacggatcgcccagttcatcaatttttcggcgagggtattcagggacctgtttgtcttttttcaatgcagagcgagtcatcatgacgagatcaccttgtcaggaacaacattgtttatacccgtcatctttcaagttgcttctttagttgcttctttgttggctgcactcactcaccccggtcacatcgttatctatgctcccggggattcgctcccttgccgccgcgatccatcttgaaatccattgggtatatattttactttcgcgatcaagggaagtatttaaaggttctctcaaaatgaaaaagtttccgcagaacaagcagaaaaatggttggcgataagttcagcagcagtcatacccgtacaagcaaaatgtaatttgttttgaattgtcttaaagaaacgtgttgtttctttattagatggttcatagtctgctgccatcgtgaaaatctttttcaaccgctcgatcacaggagtcgtatttgattattaacttgttgatttaattctgtcatttcgtattggataaatgagtaacccccataagcacccccaaatgattttgcttgtagggttcgggggcatcctgagctactttttaggctctgttttccactgtagcaaaccggcgatatccttctcaccttcggcttcttttaagcgccggtgttgttcagcaaactgactatattccgcctgcgctttttcatcggccattttcttactgactttacctgcgccttgcagaacctcgcggtcgttaaattgcaggaactgatccagcttatcctgccagtcgcgtaaaaagacctgctgacgacgacgggcctgatcctcggcaaaatccagccacatgttaaccacacgattgagttcgctgacctcatcctgattaaggtagttttttgccaccgtcacatcacatttgcgcacctctttgcctttataactggtcaagcccatgtgcggctggctggcgtcagcacgcagatgaatgagttcagcggcggtatgtccggtacaggcaaaatgcaacttgttctggatggtttgaaaaaactgcgtggtttctttcaacgacggttgatagtcagccgctaatgcaaagatctcccgcacccgcaaatacacccggcgctcgctggcccgaatatcgcggatgcgttcgagcatctcatcgaaatagtccggtacagcagaagaaccaacaggcggatttttcagccgctcatcgtccatcacaaaacctttgatcaggtattcctgaagcgtctgggtggcccactggcggaactgtgtgccgcgaggggaacgaacgcgatagccaacagcaaggatgacaggcaggctgtagtgaagccgattgcgacttacctggcgactaccttcctgttgaacttgtaagtaagacttacaggttgcgttttgttcaagctcgccttcttcatagatcgctttaatgtgctgggtaacggcctggggggtgatctgataaaggtttgcgatggttgcctgagggagccatagtgtttcttgctcaaagcggcattcaacacgtacatcaccgtcatcgctggcaaacataacaaattcgcctgccggggattgggttaagtatttatctgtcatgccgcctccgcttacatctgactcataatgctgtaatccgcttagtatgccagatatccctggtgaagctcattacgcagatagcgtttattttgctggtagcgccccaggataatgcttcgccacgatatcattcatcttctctaccagatcagggcgtttaaacgtgatatgtccgctgcctttctgaaaataacgaatgataaagagatcatcctcgaagacctgctgatgtggattatcgcggacaaaatccataaaccggatagaaacatcatgccgattatcgggaatggttttaccatccagcaggtgaagcatccgttccagatcggctaactgatcacgccgccagccccagttcaggctgtagccccatcggtcatgcttcaccagattgttgatgatgatcttcttgccgaaacagcagggattattggttttgtagtcccagcttaatcccctgaacacattgatgatgccacgttcaaagacctcctgtttgttgtgatgaagctgctcaaacgtactcaggatattcgcttcgctgattgccggaagatcgccttcttcgaggttcttagcccactgactacacgcctcagcgtccattaacgtcaacatcccggacttcagcatgagatcgcgccagatactgcggtcgatattgcgggtaatcaccggcattgctttatctactggttgcatcagccagcagtcaaaggaatggccctgtcgcatcgcccaatgctccgccacatcaccaccgatgctggaggttagccgtgagatatcatcaagcttatggatcagaatttctatcaggctcagcgcagcatcacgtcctgtgacgatacgttcaatactggtcgagcaaattagctcattatggtcagttaagacttcagcttctgtttgcatgtttttgtccgtataaaagcaaacgcgcctgccgggagtggcaggcgcattatgtagtgagtaaataaggaagaaagatcgggaatgtaattcgggaagacggctcgcaagattcagcgagttgaaggatgatggctttgccgcaaaaggccggttgcttgccttgcccgtaaaatatctacagcccgaagataaggtgattgctcctgacagttaaacctcctgaggtcgatacgaaccagttcgtacttttctaccaaaaagttaacggcatcagccaatgtaataccagcgttgatatgttcctgaataacagtttcatcgctgaacggcgtgtcattcagggtgaggccataatgttgctccagcagacgtgtaagtagagtttgccagacaagcacaggtggcggtcatggcttcgccacccgctgatttgcaggaaaagttgtcatagggattctgttgggaaattgagttaacgttgagtgggatagatagcgatgtaaacgtagccacagctaccgagcgtatccgcttcacaggtcagttcgttgtggtacagcgttacacggtgtgcatcgcgggagttaagctcaccagagagcagcatcagctccatctgtttaataaagtgtggaaatgcggcattcagttggtggcactcttcctcattgaaagtgccagttatcccggcgcggtcagctaaataatgtagtcgattgccttcctgtactaaccttgcggtaaagcgaggcattaaatcgtaccgaagcccccattcagggttatcgtttttttccatagtaggttcctattcagagcagataagtacgcggagtcggtgttacagccagcccatctcagcaaaagacagcgtattgccatcaccgataatgaaatgacccagtacccgtacttccaccagattcagggtatttacgatccggtcagtgatagtgcgatctgctttgctggcatccgtaatccctgacggatggttatgtgcgagaatcaccgctgccgcgttatggcgcagtgctgatttcacaatttcacggggatgtgcttcggtatggctaatcgtgccgagaaatagagtttcatgttccagcaggcgatgttgattatcgaggtagagtacgacaaagacttctctctcctgccgtgccagatgcagttgtagccaggttttcgtataactggcagcaagaaactgctctcccggttggcgctggtatttttccagcaatcgcagtgcccgtcgaataatacgttgatcatttaccgaaaaagctggagttaaaattagtccagacatagtgactcctgaaaagtaaaagccccgccgcagtttagcgcagggcatgggatgtttgataatgcaaccagatgaacccgacagttaaggaaggtgaaagaaacaatctcccatttcactctgatattaaagacctgttattttttagaaattgaatcgtcattaataaaaggatcttcaggctttggaaaggttcttagcttaacgctgataatctgattgtcagcaaaggtaatataatgattgctgaaaatgtcttcagacactttttgcatgtctaccatctttttaatttgcacaggttcattgagtacaccaacaaagtagcctcctgatccacgtgtttttgcttcattgatatggagcatttgtaaatattttctgtaacgaccattttttctaaatacttcggcaaatcgcatatatttaatattcatcagatcgagatgataatattgttctccgccgccctgcggatataaaggcgttaatagaaaacagtagtttacatccacatcagcagtttcttttccgttcattttctggaatgtgatatttgcttcggtaataattaccagatttatccacggcgggatctctggcatatacatcggaagtttcccctgcaaatcatctattataaatctctttaaattacccttgttaatccttctgggcataatggcttcaataaaaggtatctggcatctgaaacctgtgttaactttttttggtaaagatgtacctaaaagtattgcctgtgtagagtcattctggttttttgagtgctctgttttctttatgattctattaactaagaattcatttgtgtagatgctattatatatatttccatgttcctgaaattgtttttccagttctcccagttcatattcccctagggcaaccgcatgaatgattaaatatcactcacattagcaaaacccgcctgtaatactcgctccaaaaattgggttttcatccatattcgtctacgcttcgctttgatgcttaattgactcgtttcttttttcagcatgtttaacgaaatacgtcgtaatatcgcgatgttttccgccgcattttcacggtaaatttgacaatcatcttccttaaacgtcacatcaagcacccagtgaagattattctctatttgccaatggctgcgtactgcctgagaaaattgttcttctgtcagtctggctgaactgatgtagtaacggtactccagactgggcaatttgccgttttcttgcctgtatccgattgtgacacccagggtttttaatcccgcccattccggaaaatcggctttgaatgtctcggcattcagcacatggctttctctgatttccagacgaccatgaccctgttctatccgcgctttttcgggtgttaagggcaaaacgcgctgggcttccagggctttttgaatggcacgatggagacgtttttggttgtctttcacacttaataaataatccgcgccggcatcaataatctcctgagcgatctgcgtttggcatcccatcgcatcaatggaaatcagcgcgcctttcagttccaacaacttaatgagttccgggattgcggtaatttcattagattttttctgggttttaacctggccgatgaccattttattggctgtcgcataagcactcacaaggtggagagccgaaccgcgttctcccggggcataggcaccccgtaaaactttaccatcaatcgccactaattccccctgagtgacctgatgaaccgaacgcatccagttgataaaacaaagattaaattgttccggattaatccgtgagagaagtcgggcaatcgtgtcatcaacagggatcccctccttgaacatattatgttcaagaaaccattcatggtggccttcaatatactcttggatctcactccaaccatcggcgccgcccagaacagcgcacaatgaggcaaataaaatatcgaataaagggtaggcaactttggcgctttgacggggatcttgaatgtctgagaaatgttcagtaaaaatatcaaagcacagggtttttgctctcaaaaagagagtatgagatcataactattaccgtcggtcaaatctgatttttttaacaaaatattcacgatcttgccctgcgatagatgccgactgataaagatgaccgaacctcctctgggtgctttactatgaccagaattggcagtccgtcaggcggtagccggagaggcctgaacgccccttgtgtgctaggagcggacattccacacttctgctaatgtggccaaaatcggcatgccactacaatctagcaaaggatagataatggataaaaatgagccaacattatggcctccataccaagtcttctatatccaatctatgttgttcaatacaacatcggctctacaggccgtggatagagcatctaagtacatccaagctatcagtgaagggaaactagggccacaagatcggaaagatgagcttctagactgtctacaaaacttcatcaatcatagtgctgctatagctcggtacttctttccatcaatgattggtggaaaaggtgagaaggttttatataagaaccgtgctgagtttcttaggcagatttttgatgtgacagaaagcagccctttgcatgataagaaacttagaaatgcaatagagcactttgatgaacgactggatatgtatcttgaaggtggaattgtaggaaatatcttcccaagtctaatcttgaacaagccagaagaaacagatgtgccgcatcacatcttcagagcctactatctaaatgatggaatttatcaagtattgggggaaagacataatgttcaacctattcttgatgaagtcatgagacttcatgaactgttggagatgtttgatgaaaatggtggaatgtttgggaaataaaaaagcacctccgggtgcttttttattttagatgtttggatgcttaacgaatggttaagcctgaaaattcatccttcttctttgaaataacattttttatccattctggattccatcgggcatagtctttaagtgcccatccaatcgcttttctaataaaggactcattctctgatgatagtaaatcagagtaatggtaaaggcgatctattgacctgcttcccgtagattaacacacaccaataccagtaatgtccaccttgacggtgattacaattgccaacatccgctacgtgccaacagcggatctcttcgccaggggtaaatccttactacaaatcgcaactacttgtgttaaaaagaagtttcaggctagttatgtgtgaagctttaataggagtggaaatgcgaactcagaaacgatgtatgggatatgtagccatagtagttgatgactatgaccgcgcaattgagtattacattgaaaaactgggttttacccttgttgaggatattccacagccggggaaacgatgggtagtcgtttccccgacccagaaagcgattgcaatcttcttctggcgcgagcctccaacgagaggcaagaagatttcatcggcaaccaatgcggcggtagggtatttctttttctccagactgatgatttctggcgcgactacaatgccatgaaatcaaaaggcgtagagttttctgaggaacctcgtgatgaggtatacggtacagttgtcgtatttgaggacctttacggcaatcgctgggatctttatcagaacaagtaaggctaaaaactatcttccggctactttgtcagtatgtagccggtaactgctgttacgtctgctctagtcgctcagagcagacggtcagattcgattacattctgcgtgcggaagctgtcagtacgagtccgagttaattcagattagaggcgcagttttctatccttcattccgcacctaattcaggaataaaccgctttatattgtgcacctaataaactcaaaagctcatggtggtaagattgcattcctgtcaccattttatgttcttgaaattcaaaggtgctgatcccttcaaaggccagaaatacccaacgcgcggtgggggattgtgtcggtttgttcttcatatcggggaaaaacggcacattttgtttcaattcatggcgaattttatgttccagcgccgcataaaccatgagacaacatgtcatcaccattaacagcgcttctatccgctccggttttttcaggaaaatggcagacgtcaggaattccggacttttcaggaagcgaaaaccccgctccaccttttgttgtgccttataattagccagtaacgccgccatatcaagccgtccttcatcccgttcattggtcgctaaaataaacctcccgacccgcaatctggcctgcttcaccttgtctaaccgggtataagcctgaccggctaattgataatgaaccgatttggggggttgatgcttgccgggtttcccgcgccccgcatacgcggtaatcgcctgaatttccggcgaggcgatgccgataaactggcattgagactcaaaatcatgcagtgcctgtaaggcatcctcccggcaggcaaagggctttttgcccagtttgtcgaactgtttagactcgttttctgtttccctgagtgtgtttttccggaaagtctggttttcacgtttttctgccgccgtactgttcaccagtaaccaacgctgaggaacgccgccatacgatgacgtcacccagcagcctgaatagccctcactgatggggctgaattgctccgctgtcacgttcaggagagactgtttagcttccttgatcgtcaggggaacacgcgtaataaatcgttgtttttgctgatgaagcgaagcgatcgcggcttcagtataaagggcggcatcggccacaaagtagcggctgttttgtgccgctttcagacattgaatatgggttttgatcgtctgggcaaaggctttggcatcattcgtattcccgctcatggcctgcatgtagacagggatacctgcctgattttcgcaaatcagttcaaggacaaccgggttcagttcgggccggtgatcccggctataacccggcaccagtgcaatgcgttttgtgtcatctcccaacgcgctgtcatagtcaccatcgacatgaaaactcgtgatatccaaatgaacggaatcgggatttaaccctaatttatcaaccacttgctcagcaagcacctgataaacttccgacacccccgcttcatataaggcatccagtgttcggccgagcacatcatcattaaggtgttcagcttcaatgtctgcgccaattaaacgcgcaatcggcttatgttgaaaaaagccggaaaacatgtgcaatgtccggctgtgaaaccccagcccgttaaggatcatcgccagaaaagcgtcgccgtgagagacggtatgcgatgaatattttgggataatggcatcaatcatgcggggtaaaccggcttcatgacaaaaagcggcgataaggccaagatgatcgagacgtttaatggcaggtatgggtgtggacatattcgctttccggcaaataaaagtaatagatcaaaattggcgattaccgtcaaccccaccgatgtcatcaatacaaaaaacctgtgtaagatcacattatttttaaatcagaaatacggtgcggaatgacggttctatgatttgttagaacccgcctccttaagaggcggcattcctagcgagcagttctatttactgtttattaaattcaataatgggacgtcagttacatcattaggaatataggggtcatcttcttctaaattaaccccaatacaatcaacatcatttaatccaatttcccaagcccaccgaacgtctaacgtactcatttctatacctaaactatctttttgtggatgttcaggattaatattttttaacatcgcatcacatcctagatagaattttccacaggcatgatacgcagcaataaatctttccaaattgacattgctatcgggagtcatcgtattaattctactgatcattgtcattcttttagtccgtggggttgtcttcatattttcagatatgagtactctataatgagttgggtttttaactgaaatacccttgacaatacaaacccgtaatctggctttagtatctaacaagcctactgatgatataagatctttaaaaatatcttcacccacactggagtctttaaataaaagatataatcctgggtgacatgttttgacttgaacgaagcccacccctttccagcgtgttctatcccacagacgaggtttgattagactttgtatggaataatctttatgtgttatattttcagcattaagttcctcttcaggcatttttccttttccaaatattggatcatttatatcctcgatctccaacactttaggaaattcactatcccaggatttatctcttagaagggggtaagttttcttttcagcactagtggaataaattttcttaattttttgatcaatatcatttccaagaacattttcaatagctttgatacaggcaccgaaactaattgctctgtcgaatgctgcatcttcgaagatcattttttcaatgtattctgtattttttataaaaaataattcagggagaagatcaaatactattttcttgaattcattggtgattttttgttgagcttcgattctaaaatcacttgtatcaaaaccagcgcaatttattgtaaggtttagttttccactattgctatttatttcatgtgataaggataagtcatcttcgtcatctgctattacttcaatatttaaaaatgcttctttcagatggatgttatcaatcgtacaagttgcaaaagcactctctaaaagtgataagacattagttgaaaactctataaatggtgaccgattcggaaagttaatttctatggcgcatccaaaaataaaagatgtatgtactccacgtttgtcatggttatcttttatacctttactattaaatcctgcatcaaagtcacgtattttttgcaaaaaatcattattatcattatcggcagtaacttcgtactcacgctcaaactcttcaatataacctaaagcatatttaagacatcccgatgatacaaaaagatccaatctatcaagttcatcagggatattgatctgtcgatttatttgttttagatcagtgttcaaaatgagctggcttatgtaaaaatcaacttgttgattttctttatcaccgagcgagctatcactgatattctggttaactattaaaaacaattcataccataaaagggcatgtgctaattttcctagttttatttctgttaggcataaaccataataaatctcaacctgctttaatgatatctcatcatacttccagtagtcatctgtaatcaacgaagcggatagaagcaagcatgaacgtgaactccatagcaacccaatggattcgtaagcataggctatagcttttaatgctaatataaatttatctcgtgattcttctttatagagtggaataaaagattttcctaaatacttgattgcctgataagggtgaccattttgaatcctctttatgcctcttcgtaaatttaataatgcccctttaacttcaccgcctctaagagcggattgctcagtcatatagtctaataaattttcatatgcatcaacctcgaaaaagatgtcatccagttcgttcaaaagttggaagtttttctcaaagggatagcctattaaatttccactatttttaaaaatttcatgtaactcttcaaatacaaccgaagcatcttctacatctgaaaacgttgtcattttataaatggctttgtgagttctcgctgtgagtgcattactgggacgtgattcatcgtcagctatctcatctagtttagcgagcatattacgttcaatattctcaatgtcgattgtagatgttgcgttgttaagtctaatataacttttatggactgttactaagtttaaaactttctcccattttgaggagttagttgatgatgctatacattcatacgctaattgaagattttcttcgaaaaggttaaaatcttccatccaaaaatgggacttccaagcgtattgataataagcatccaacaattgttggtttgtcccaaatttttttgagatttttatcgctctttcaaatagaccttgtgtttcaattatcgctttttcaagctcagcgcttaactctgcaacttctaagaaaatatccacttgctcatatgaaatttcagcagggtttactttatctctgatatactctattagttcttcatatttcttattcttcttatagtcattttccccaaaaataatttctcttttatattgcgttggaactgatagtgtatcaatcgccaatttctcaaaatggtttttgtatatttgatctagcaaccaattaatatctaatatacgaacatctatcccagttttgttttttagtgtatcctcaacctctgaacgaacattggactttgcagattgattcgtcacacaaaatattttagtatatccgcgccctgtttcttttatcttaagtacatcttcatggcattttttcttccagtccttacgcgtactcaccgcaaaggcccagcgctctttatttgatgtatcattaactccttcgaaccaaagaagcttactttgttccgaaactggaaaggtttgtgtgtcagttttaccatcgccaccagctacagggcctgtctgctcaaggagattagggcaaattattttctcacatattctttttgcaaaatcttcgaattgcaattcttgatttcttgtatttagagtagaaagaaaatgttcaagtacaactctatctaaagaccctgtctctcggatcgttgaatcagaaaatttttctggacgacgacgctttagaaattctttagatgaaaatttggcttcctgtactttcatgattgttatgctccatgtgtcaccgacatcaaacctttgtgtttatccgctggagtttttattcatactactttttttgaataaaacaccagtgatgtattatcttcaggcaagctaactatgtaatcactataccactgcatcatctccctacgcccctccaaatactgggcatggttgtaagtcccacgtatcgcgttcttatccacatgcgctagctgcgtttctatccacgcggagttaaagccttcttcatgaagaatggtactcatcgtgtggcggaaaccatgccccgtcagccttcctttataccccaacaactcaatcacctgattaacgctttcctttgagatcggcttcgttcgatcattgcgtccgacgaataccagcgggtatagcccagtaataggcttaagtgactcaaagagctcgacaacctgatccgacatcggaacgatgtgtggtcgtttcatcttcatcacttcagcagggatctcccagagccgcttttcaaaattgatatcctcccagcgggcaaaacgtaattcctgagttcgtacccctgtaagcatgatgatttgtgttgcagtcttggtaataacgcttccagtataaccggccagatctttaagaaagtgagggagttcttcagcagtcaggaaaggaaaatgcgttttctttggtgttgcgagggctgtagcgagatcgggtgcaggattgtattcagcgcgtccggtcacgattgcatgacggaatacttcaccgcagcgccgtctgactttgcgcatcttttctaatgcaccacgcttttccatacgacgaagggtttccagcaattccatgggcttaatttcagctatgggacgcttaccgatgtaggggaaaatatccttttcaaaggtatcaataatttcatcacgataacgtaatgaccaacgatccgctctcagctgatgccattcacgggcaatagcttcgaaggtattatcatagttgagtttttgagcaattttctctgctttctttagctctccgagatcgcttccagcagatagtaactttttcgcagcttcacgcttttcacgggcttgagcgagagaaacctcaggataaacgccgaaagcaaggcacttttctttacccgcataacgatactttaaacgccagtagcgtgagccgttggtggttacttcaaggtagaggcctccaccatcagatagtttgtacggcttctctttgggcttggctgtgtcgatttgtctgactgttagcttcattgggggcatctcaaaatggggctataaatcatgccccccattatgcccccaaaatgcacttgattctggtagagacagttgacctcgggagaacataatcagcagtaattgcgggtattataggggatttacttgagacagtggagttcaggagaggctaattggcggaagatcacaggagtcgaacctgccagagaccgctggcggccccatctggatttgaagtccagccgccccaccggggacgatgatcttccatatgaatactaagaattatgaaaagcaactcatcatagcgcatattatctggcttctgaatccgttagctgaaatcattctcaatttcctaaaaagcattaaattttattgttcataagctcaatattcgcgttgagtttgtcgaattttacctacatcttattagccgatacccattacgatacagcgttgctccgctcagcaatgtatccaacacataaaaggacgctttatatgactaacccgttactcgttccatcaggtttaccaaaattttcttctattaaaccagaacatgttgttccggctgtaaaggaagtcattgccaattatcgccaaaccgtcgaaaaaatattggccgagaataccgtttttacctgggataatctgtgtcaaccactggccgaagcaggtgataaacagtcccgtgcatggtcacctgtcaatcatctgaattcggttaaaaacagcccagaattacgcgccgtctatgaagaaagtttgccattactgtccgaattcagtacctggttaggtcagcacaagggattatatcaagcgtataagtcattacgtgaaagtgctgagtttgagaagctctctgtgcctcaacgcaaagttgtcgaaaatgcactgcgtgattttaaactatccggtattggtctgcccgaagagaagcagaaacgttatggcgagattagcgcacgtttgtcagatttaagttcgcaattcaacaataatgtgctcgatgccactatgggctggaccaaattaattactaatgtgaaagatctgtctggtctgcctgaaagcgcgattgccgccgctaaagctcaagcagaagctaaaggtcaaaaaggctggctactgactttagaagcaccaagctaccagccagttatcacttatgcagataaccgtgaactgcgtcgggaaatttaccacgcctacaatacccgcgcatccgatcaaggcccaaatgcaggtaaatgggataacagcgaagtaatcgccgaaatccttgcgctgcgtcacgaacaggctcaattgcttggtttcaaaaattatgctgaacaatcccttgcaaccaagatggcaaaaacccctaaggaagtgttggattttctgaatgatttgacaaaacgcgcacatccacagggcgaagaagaagtagatgagttaaaaggttttgctaaatggcatcattgtgcccacaagctagaagcttgggatatggcttactatggcgaaaaacaaaaacagtacgagttctctatcaatgatgagcagttacgtccttatttccctgaacaaaaggctgttgaaggattattcgaagttgttcgccgtatctatggtattactgccaaagagcgccatgatgtagaaacctggcatacggatgtccgtttctttgatctgtacgatgacaccaatgagctgcgcggtagcttctatatggatctgtacgcacgcgagaataaacgtggtggcgcttggatggatgagtgtatcagcaaaatgcgtcgttccaacggcgaactgcaaaaacctgtcgcttatctgaattgcaatttcaacaaacctgttggtaataaacccgcgctattcacccacaatgaagtcaatacgctgttccacgagtttggtcactgtctacacctgatgctgactcagattgaaactgccggtgtctccggtaccaatggtgtaccgtgggatgcggtcgaaatgccaagccaattcatggaaaactggtgctgggagccagaagcactggcattcatctctggtcactacgagactaaagaacctctaccacaagccctgctggataatctgttagcagccaaaaactatcaggctgctatgcggatcttgcgtcaacttgagtttggtcagttcgatttccgtctgcatgttaactacgatccaaagaaaggcgctcaaaccatgaagaccttaaaggaagtgaagaaattggtctcggtagtgccttcacctgaatggggccgtttcccacactcattcacccacatcttctctggcggttatgctgctggctactacagttatctgtgggctgatgtgttggcagccgatgcttactctcgcttcgaggaagaaggcatttttaaccgcgaaaccggacaatctttccttgataacattttgtcccgtggtggttccgaagagccaatggagctgttcaaacgcttccgtggccgtgaaccaaaactggatgcaatgctgcgcaaggccggtattaaagggtaatttaaggtgggaatctgtttaatctgtgaacaaggcgctgataacagcgccttatctcaactcgcggagcgctgggggttggtgcatgacgaaaacgctattatggcgttggtccttactcctcagcaccttgaacttcgcaaacgggatgaaccaaagctaggtggcatctatgtcgattttgtatcaggtacaatggcacatcgccgccgctttggcggcggacgcggcgaagcagtcgctaaggccatagggatcaaaaaagattatctgccaacaatcgtggatgctaccgcaggtctagggcgagatgcctttgtactggcatcattgggttgtcatgtaagaatgctggaacgccatccggtggtcgcagcattgctggatgatgggctgcaacgcggttatcaggatgaagaaattggtggctggttgcaacaacgcatgacactgctccatgcctccagcattacagcgttggccgatattacgccacaacccgatgtcgtttatcttgatcctatgtatccacataagcagaaaagtgcactggtgaaaaaagagatgcgagtgttccaatctctggttggcgctgatgaagatgctgatagtttgctatcccctgcacgcgttttggcaaaacgccgcgtcgtggtaaagcggcctgattatgcagaacccttagctggagtcgctgcatcagcagctatcaccacgaaaaaccaccgttttgacatttatccttgttaaaaaaatcagccgtatattgcggctgatatcttttaacctacagaataccttgagcaagcatagcgtcggcaactttcacaaatccagcgatattcgccccctgaacataattgatctgtttgccctcgccaccatactcaacacaagcgtggtgaatatctagcatgatatgatgcaaacgtgcatccactttttcagccttccagcctaaacgggccgcattttgtgccatttccagaccagatgttgccacgccacccgcattggctgctttacctggtgcaaatagcacacctgcttcaataaaggcttccgtcgctgaaatagttgctggcatattcgccccttcagcaacagctttaacaccattcttgataaggaccttagccgcatccaaatccagctcattctgggtggcacatggcaaagcgatatcaaccggtacagaccacggttgtaaccctttcaagaaagtcagaccccgctctctggcatattcttccactcggccatagcgttggttttttatctcttcaagatgagtcagtttctctggtgtgaacccatcctcatcaactaaggtaccgccggaatccgaagcggtgaccactttcgctcccaatgccatgcatttttcaatcgtatattgcgcgacattaccagcaccggaaaccgatacgcgcataccttcaaaccccatgccatgacgtttcaacatggcattgacgaaatagaccagaccataaccggttgcttccgggcgaatcaaactaccgccaaaagagagacctttgccggtaaatacacaagccgtgttgttagaaagctttttcatcatccctgacatgaaagccacttcacggccacccacaccaatatcacctgcgggaacatcagtatctggccccaaatgacggtacaattctgtcattaatgcctgacaaaaacgcataacctcgccctgactttttcctttaggatcaaaatctgaaccgcctttaccaccacccattggtaaggttgtcagtgcatttttcaaggtttgttcaaagcccaagaatttcagaatagagaggttcaccgatggatgaaaacgcataccacctttatatggcccaatggctgagctgaactgcactcgccatgcacggtttacctgaactttaccttgatcatctacccaacaaacccggaactggataaccctttctggctccaccatacgctccagtaagctgtattcacggtatttcgggttttgttcaagaaacggccaaagagaggtgaatacttcccgaacagcctggagatattctggttgatattcatccctgcgttgaatcgatccaagaaatgaagacaaagatagtaaacagctcatttagttattccttatttctacttcggttgtaatggcaccccagccattttctaataattatttttgtcgaaaatgtgaggtaagttgtgtttgccctttgaatatatcactgttctatattcatctttcaagaagtttttttgcagaaaggtaaaaaaaatttcttgattgcaccgggcataaactaaacaacactccatttcacccaaaaaaacgcctgcataagcaggcgattttatcgaataacttttcaatctgttgtcattcatcatcacgcagaggaacaatcagcatatcaacatgcaccgtgttaattaactgacgagcagaagacatcaatttgctccagaaatcctgatgatgaccgcaaacaaccatatctatgccatatttcttaattgcatcaacgagtacttgccccagatcaccgctaccactcagggtttcctgaatgtcataggctgaatctgccgagagagctttcagcgcactgcgggtctcctcagaaatacgttgctgcatatcaccgagattaacatcaatcaaaccggtgtagagatcggaatagttaacatcaacatggatcagggaaactttggcattgtccggtttagccatagaaacagcttttctcaccaaaacctgactttccggggataaatcaaccgcaacaagaatatgtttgtaagccataagcgaactccttccataatgccgagttagtgagttggcagggcaaattgccactatcctgtgtttattactactgagaatgttcttcaaaattgtttcgatcacagcccatcatatttaacgactgagcaaagaacatccaccaaacaaacaacatataccacaattgctcttcctgctacttgatggataacaaaatcctactctgaatttatagccttccttgaaactcaatagatttacgcgaacaactaaccggtctctctgggattgcatggttggatagaactgactagatgagtgtttatgacgtttttccaccagttttgtcccaactgatacaaaacaggttttttgtactatctgactatctttcctacaataaatataaaggtgtcaccacctgcaattttgattttttcttttctgtgacagctctagctaaccattctaaggaggggattatgttcagtacaatcgcactgttttgggcactgtgtcttgtctgcattatcaatatgatgcgctacttctcttcactacgagcattgctgtccattcttcgtcaatctgatcccttgctttatcaatcagtagacggtaacggctttttcactacacatgggcaacttaataagcaaatacggctagtaaactatatcaattcacaacgttaccttgatcaccatgatccagaagttgttcttcgttgtgaaaggttgagaaaacaatttattttgaccagctcactgagtggattagttgttatttgcctgatttctatgttgatttggtattaaatagaaaggcggtatagttaacccataccgccttcaaattattcatcaaaacaattaaatcagtttcaaagcgaaccagtaaagcgtaccagacaacccgattgaaaccggcagcgtcagtatccaagccaacatgatattctggatagttttaccctgaacaccaccgccatcaaccaacatcgtccccgctaccgcagaggaaagaacctgtgtagttgaaactggcatcccggtataactcgccacaccgattgaaacagcagcagtcatctgagctgaaacaccctgtgcgtaggtcataccttttttaccaatcttctcaccaatagtgactgcaacacgtttccaaccaaccagtgtccccaaagacagagccagtgctaccgcaatgatgatccagactggtgcatactcaacggtgtgtaataagtctttccgcaatttattcaggaaacgggcgtcttcagcacgggtttccggcagtttagccagagactcagccgtatcagcaatacacatcaacatgcggcgcatattgttacgctgttcagcattcagctcactgtagctctgaatgccttttaataggctttctgtctggtcaagaacaacgacagcacgcgtaatatcacaatggaatcgcccttccggttcatcttccgcaacaacgaccgatggcgtcagttcaattgcatgggataacgctgcaccatgctgctgataatattgctgcaagtgagtaatggcatcgtaggtacgggcaatgtcataaccattagcattcatgtttacgacaaatcccgctggagctacaccaattagcaccagcataatcagaccgatacctttctgaccatcattcgccccatgagagaagcttacacctaccgcagataaaatcagcgcagtccgtgtccagaaaggaggtttacgcttaccatccttcttttcacgttcagcgggagtcagatgaatacgtttacgtttcttggtgctactccagtaacggcgcagtagaaacacgattgcccccgcaatgatcaatccgattaaaggagagaggatcaacgacaggaaaatctgtatcatcttcggcacattcaacgcatcaaccacagaagaaccggttacgatcgcattggtcaaaccgataccaatgatagaaccaatcagggtatgagaactggatgcaggtaaaccgaaataccaggtcccaaggttccagacaatcgcagccagcaacatggaaaacaccatagcaaggccatgagcagaactgacattaagaagaagatcggttggaagtaaatgtacaatcgcgtaagcgacacttaatccaccaagaagaacaccaaagaagttaaataccccagccataacaacggcgaactgtgctcgcatagcacgggtataaataactgttgctaccgcattcgcggtatcatgaaagccattaatggcttcataaaatagcacaaacagtagtgccagtactaacattaggctggtgtgaaaatccaggccagtaaaaagatgtagcataaacgttaagccagttagttggacatgaacgcggcgcattatcagtgacaaatgctagcgggggaagtgaaatatgaactttttttgatttcatgacaactagataacaataagaaataggaatactccttatatatcattaaattacatatcttttaaaaaattgacaattctaagttataaaggactttttccctacaaacttatcaaaaatacaacatattaggggatattccccactaaattatttagtcataaagagaaaaacagtggaaaaatttgatgcggtgattattggtgctggtgcagcaggtttgttctgtgcagctcaggctggacagctcggtttacggatactcgttctggataatggtaaaaaagccgggcgtaagattttgatgtccggtggtggacgttgcaacttcactaatatgtacacagaaccatcagcttatctttctactaacccccatttttgtaaatctgctctagcccgttatacacaatgggattttatcgaactggttcagcgtcatggcattgctcaccatgaaaaaacactggggcagcttttttgtgatgattccgcccaacagatagttgacatgttactgaaagagtgtgaagccggtcaggtcactattcgcctgcgcagcgaagttagccaggtagaaaaaaatgagcaaggttttgttatcatcgttaacggaaaagaagtaagtacacgctcacttgtcattgcttccgggggattatctatgcctggtcttggagcaacgccttttggttatcggattgcagaacagttcggcatgaaagtcttgccaacccgcgccgcccttgtaccttttactctgcataaaccactactggagcaacttcatatgctctctggtgtgtccgttcccgccattgtcactgccgaaaatggcgttctgttcaaagaaaatatcctgtttactcaccgaggactctctggtccagcaatcttacaaatttccagttactggcaatcaggagagtttgtaagtattaacttacttccagatagtgatctggaagcccttctggagaaagagcggagttctcacccaaaccaaagcgtaaaaaatgctttggcaaaattattaccaaagcggctgacagaatgcctgcaagcgctcggtcaaatcccagatattgctcttaaacaactaaccccaaatcagcaaaaacagttggcggtaaacctccaatcatggcgggtacaacccaacggtacggaaggctatcgtacagccgaagtgacgatgggcggtattgatactcatcagctttcatctaaaacgatggaagctaatcaggtaaaaggactctactttattggtgaggtagtggacgtcaccggctggcttggtggctataacttccagtgggcatggagttccgcctgggcatgtgcgcaggcgttgtgactgttgtggagagacaataaagtttgcccgtaagagcaattttccttatgttcttaccggcaaccatatatgtgctctgaacaatccagtcgggtttaattgtccagtcatgcctgtttttttgccagtctgtaatcgcatttaatgttgataagctaccacccataatggtattggcttgttatcggcatacagtgggtcttgagggtatgtccatttagtggatgaaaaaacagaacgatcgaatacaacatcaaaattgcaattcatacatccaccattaattattttttttaattaaaaaagtataataaatcaatagagttatcaagctaattagggataataatgaaaacagtagagtagcattaaataaatcaagcatgatccctccgtaaataggtgctaaagctgctccgatacttgacatattagaagcaccaaaaaaagctcctcttaaatggtgaggagtgagcctatcaacttcgacattaaacgtaggtatggcaactatttccccaaaactcagaatgacagttgcgacacagagataataaactgtattaataggtgagaacgcaaaaatgatttgagctatggcaattaacacgataccaattaatatttttattcttggtgtaaaatttcttaataaaattaaagttgggatttgcaaagtgataattgtcaatgagttgacaataactaataaagcaataaaattggtaacattgttgatatttgatctagataaatactgaacaagcgtagaatcaaagttagcataaacaaacataacaagaacattacataatagaagtatcacgaatgctcggtgagaaataattatgttcaatgtttttgtaaagctaatgtcattgctgactttttttattttctcttccttttttgaagataataaaaagacacgcaacataataccataaacaaaataaacaatagctgtaattagaaaagtttctctctgtgccgatagaccagaagctaatccaatataaggaccaattgcagcgccaacattgatcaaataatatcgatagtattggattgactctctttctttaggagagtcaatataatcgccaattaaggctttactacacgcttctaacaaagcacgaccaatactaattccggatatagcgattaaatataagataggtgaagatgagaaggacatcatgatgaacgaaataatgcttatcatcaccccgataagcattattgttctgcggcaaaaaatatcagataaatatccagtataaatgcctgtcactgagcctaagatacttgatagcgccaataatccgccaatccctgtcgctgacatgttaaactgccgataaaggatcatcgctaaaaaaggccaaaccataaaataggcggctcttgttaacagtgtccccagtaacatgataaaaattgggggaggtaaatgttttaataaagataatctgaatagagatgccattggttcaccaggatacgtattgagttactctgacgctatttctataataatattttctttaaggtggtgactttcaaattcagcctgttccgctgttacaccacacgcaatagcatattctaatcgttgagaactatttttcagtgactcaatatgttctccaacgttaacatcaaaatggataaagccattctttatgtaatttacctttttaacaatgccagaaggtgctgtgatataagaaatagcggcatatttactgaacttcttactcaagtcaggtgaaatatttaacgaaacttggataactgctttccacatatcaataccagtagccatttccactaattcaggaatatgatctcctcctaaccgagctcctacttcaatgactttgacaccatcacttgttaccttaacctcggtatgtcctcccccattataaatacctaacgcgaacaaggcttgagttaccactttttctatttcgattttttgttgtaatggtatattagcaggcaatgtatgccctaattcaacaaaataaccattacttgatacgtattttttagtaattgtgacaatgttcacaacaccattaaaggaaatagattcaatactgtattcttgtccttctagatattcttctatcaaaaataaagaagatttttttactccaaatggaggagttatttcacagacttcacggaaattcctttccaattcgatgacattatcattacgtaaaacacctcgacttccggccatgttaataggttttataatgtttggatacccaattttggctgcttctatttttgcgctgtcaatattcgaaattagagcgtatttagggataggaacatttttttgcctaaaagactctctcattaggtgtttgtttctcgctctcaatgcattttcatatgttattcctttaagacctaatgtttctgctaccttagccacaaggggaacatagaactccataaatgtaataacaccctgtatttttttcttagcattgatatactcaaccatatttataacaagttcatcgtcattagtatctgcttcgaagaattcatcaatatagagtaaatcattatcagatactttattatagtacttccttgatccaatgaatataatataagcgcccagctcttttgctttttttaactcaatcgaaccggatggttttttttctattaccaataatctattagacatttttaatctctatcgatctactagagaggttattcattagctcacgagaaaaacacccattctttaacacaccgtttaatcttttattaacaagatcgttaatttcatcaagataaatatgaatgtcttggggctttatatcagtaacaggtttacttaatggtttatcaccatggaaatcatagacaatcggtttatttgtcatttttattttccttgcctagaatgtttgaaattaaaacttatcatttgcatagttattttcaagtgttttttgatagccaagaaaaaatatttttgtcacattaacggagaagtaagacagaaaaaacgatagtataaaaactgagaggcttaaattcaataaaaaccagatgcgataattcatattacagtatttctggaaagtgtttcatggaaactataatcatatccaatcaataaagaattgcggattctaaacttaaacttctttttagtggaaatgtcccccctcggacttatcgaccttaatcacccttctatgccacctgaactacaaaaacaaatattgcacgataggtatcataactgattgattgctgatgacttggaaacagggaatttctattacgatcgtcctaacttgcgatttataaccaatttaccacatagtgtaatgaatgacagtgagtgaacttttcgagagaatgggcgggacactgggcaaagctgtactaatctttatgaattacaagcttatcaggaactattgataaaatcccgcagaagaaacaaagaatcatttagttacataagaatccagcaaataaaattcaccaattgagtaacagactcagagcggttaaccaattacttgccttgtgaaaaccacaggtcagctctctggccttattaaccattatctcattgcagcataaacccactcagctcagtgcctgatagcttcctcatcaaaatgtgacaagccaccaacaaccgttttgggatgggaaaaacgctcgaaccgattaccacactctgctttcaggaaagttgcaggccaagagagtgattttttaactaaacgcgtttcctggtcagataaaaaatttgtacgctaaataaccttctgtgaagctaagagaagcataaacccattgaagatatccagactacgctctgaaacctgtagggagccacgtcctttaggacgtggtagatatcaatgcccccaaagagcattcattggtactgcaaatgtgttcggtatgtggctaattggcaggcaattgttacctgtgtaaagtaagatgccaccctgccaatctctgtcagccaatgaagcttatgctctcgtctaaatgctggtttgtacagcgtctatttgctggctattccatcgtccaaatgctggttttgatagcgtctatttgttggtttcctttccgtctatttgtcgatttctgacgttcttacacatcagtcaaaacttttcccttgggcttaaaggcacgactgtaacgaaaaactagggtaattagaggaataaatctaacaataccagacggtagaggaatcgacgccagtgaactctgtatccagcacacagagaggataaggagcgtcagcggacttaaaaaagcttactgtaaagctgtattagtgaggaagccccaatcttgcattcgcaaaactggggcctaatatctttcgctttatgtcggggaactgagcatcatgacaggatgggagaaaaaccgtcgactggctatgctttggaagctctgattcacaagtaataaactgtcaacataataatagcggtttagccaccaagaatttattcagatcttatcacctaaactgctttcccatttttatcgaaaaagcattcacgatagagataaccgttgcacataaactgggcagtagttgcgtaataaaaccaagaatagttccgtgatttaccgaggaatgatgatgagcttctcctcccatagcaatttgcataaaaacagagtttgtcaggtaggcataaaccaaaccgcaaatccctgtaaccaacagaaagcttataagcgtgacgaccaccgcacccaccctccgaggtaatcttcctctgattgaattgatggtgagcacggtcaggcagcccggagcaaaaccccatcccaaaatataccaaataatcattaaccccttcagcgggatgctatgtgccatttctaatatatcagcgcgccataatataagattcaggcatgcagccaacacagccagaaatacggaaacggcaaagctattgggcaaagttaatttcttattcactaaaagaccttgagacgagcaagaaatctcgcaccagttactgagttaagaagaaagctgcccaaaatgccagcgataagtgcggcagtatatcctttaatcaggaatagcaacggcatttctattgaaccccaataattcagccccacgttgtggtccaagccccaacaaagtgtttggcaaacactgaataacagagtgctacttactgcggtcatgatataagcgccggtacttccaggcgtgaaacgtgctgataccaagtaagtcaaccccccaacggcggcccccatgccaataccacataaaccaagcgcccatacgagacgccataccaaagggccattatcgggaaacaaaataagccccattaaaagaaatccagactctgcgataaagcccaaagaaataaatagcttaatcgtgcgtatagctcgtttctcaccttctgccaccacatattgcggatctcgttcattcacgattcgagtagacatttttcatctcctgaataggtgtgttaaatatctgatgatgccattcagttttatccctctgaagtagactatacacgctgatgaatggtatatacccgttatccttcaagttgcctctttgttggctgcactcgctcaccccggtcacatagttatctatgttatctatgctcccggggattctctcccttgccgccgcgatgcatcttgaaatccatagggtataaactgagtcgaacgttatagcagaatgctgtcagagcgaaaaaaacacttcataaaatatttcgaaaaatgatttttggtgtattactgataactcctaattatataaattatcaatcaataatatccaagcaataaatgaatcaaattatttaataatgcaatcacataaaaaaagtgatgtaatcactatggtatgaggatgaaaatctgtcaatatggaataagaaattaataagataatccagcatatgggctttttaatattttgatatttctgccactcagcctgacaaaatattcatagcttaattaatgaattgcaatttatttcctctacctgcaatatcgccaaaatacaataatcaatacctaatattgaggtttgtaataataggaatattcaaatgcgacactattttagttttataatttgacaataactctatacttggttattaatttaattaagcaactaacaagataattgtttaataacctatatctatcaggagatatttaatcaccatgaataaatccgagcaaaaatttaatatcaacgaaagtgtcatcaacgtagatggaaaagaggtaaagttcttcacatcccaacctctcgatccaaataagaataacgccaagagaaatcctatcgtcctggtacatggcactggcggcagcacagagatacatttcggttatctctttcaactgcttgcctcggaaaatcaaattatatccctggatttttctcaaccagtaaaaacaaacgaaacgcttacctttgaacatcttgaaaaacaggtcgaagccgttattgaagcagcagcgttgggagagactgtcacactgataggttactcgctgggagctgttattactgcttctgttgccgctaagcgtccggatctggttcgtaatttagttctgatcgcagggtggatgaaaacagatttacagttagagcgatttttatctgtctggcgtcagttatatgagatccaatcaccagctattgcagactttgtaatgttttgcgctttcagcgatgccagccatgcaaatatgtctccagatcagtttgcaatcagctttgaaaatgccataccagaggaatttgaagcattacaaatggaccttaatggccgggttgatatcactcaaattgttcctacgataaaagccacaacactgattattggctgtacgcatgatcaaatgacgcccatccgccacagcaaagcgctgtttgctgcaattcaggatgcacgctttgcagagatagcgtgtggacatgcagtcgtttatgaacgtcctgcgcagttggcacaaattattgaccaattctgcgcgaacccttcgttttatcctgctggaaccataatcccttcagacctgccataatccctttaattctctggagagctatagcaggcattgctttatcaatgattgtggggaacttttagcggtcaagttgacactcagtaattttgaaacggcaaggggcttatctctcaaattcaaacctcttgccgatgccaacaattgcaattgttttagaatggcttagtcggcaaatatttcccatctagcgtaattacagctcgtgaaccaccattaggatcatcgacttttttgatatcaagtttaaagtcaatcgcactgataatgccatcaccaaactgctcgtggacaagcgccttaagcgttgagccataaacctgcaccatttcatagaatcggtaaatagtcggatcagtcggtataccaccggggatactgccgcgtacagggatagtttgcagcagaaagaaggcatcttcttcaagttcaagtcggtcaaccacaaccctcgcagcatcggcaggcaatgggtgctggccgagtagtgcagcagtgacgaatgcgagactcagaccggttccttgtgcaatatcctcgaacgtcaaattcttgcgtgccttggcgtcgatgatagcatcagtaagggccagccggggagtttgggagtattgagattgtgtcataatgattcctttggattaataagctatttaaatgccgtggtgaaacacggattgcgttgcagaaacatgcggatagtccgcaagggaaacaaattgaccggccaagccgtctaaagcatcgatcgaaccagcctctatgtcgtaaatccagccatgtagattcaagtgcctctgttccagcccgagtgccacggacgggtgggttttgatattagcaatttgagcgattacgttttcacgcaccatcgaatcaatttgagcagtctcgttaacgtgcacacgtgcctgactaatcgctttcgcacaatccgcatagcgtaaccagcttgtaatcgcgggcaggtgattcatacatttacagcttgcaattgtggtcatggcaccacaatctgaatgtccgcagatcacaatgtcggtgactccaagcacagcgaccgcatactcaacggtagcggaaacaccgccagattctgcaccgtacgacggaacgatgttacccgcattgcgtatcacgaacagatcacctggctcactctgagtcagaagctctggaaccacacggctgtcggagcacgtgataaacaaagtacgcggattttggctggtggcaagccgcttgaaaagctcgcaacgctttggaaatacctcgcgctggaattgtaaaaagccttcaataatatcctgcatgtcttcactccatcgtgatcgataagaaaacggatggataaagaatgaacgaatttatctatagcgtcaaagatcggattactatcatcgctatagtattttccaatagttcattgttattctgcagcgacacatttgttaataatccagtagtcacctctttttgtttcaagcactagcgtacagaacaacaaaccagcgttgacatgttcaggaagcccttatagtcttcactccatcgtggccgataagacagctaacaggtgaagaatgaacgaatttttctatagtctcaaagctcaggatgtcattacttccatattattttcaaatagttaattgatatgctgctacgacacattcgttatctgctggcagttgccgaacaccagaacttcacccgcgccgcagaagaacttcatgtctcgcaaccgaccctatcgcaacaaatcagacaacttgaagagtcactgcacgtgcaactgttcgaccgctctggaaggagtgtgcgactcaccgatgctggcgaggtatacacaagttacgcccgtcgtgcattgcaggatctggatgcggggcaacgtgcgattcatgatgtgcaggatttaagccgcggattgctcaggctagcaatgacacccaccttcaccacttacttcatcggccattgggtagaacgtttcaacgcactctatccaggaatttcgttgaatatcaaggaaatgacacaagaccagatagagatctctttagcggagaatcaactcgatctcggcatcgcgttctcagacgtacgttcccccgacattgatagcgaaccattgttcatcgaaacacttagcctgatcgttggtcaatcgcatcgatttattggtcaacaaacatcattgacggcgaaaatgttggaacatgaagggctagcgctactaagtaaagactttgcaacgcgaagccatattgatttgtacttccagaaacaggggatcaccccacgcattgcaattgaggccaactccatcagtgcaatcgtagaaattgtccgtcgagggcgactcgcaactctgttacctgatgtcatcgcccacgaacagaccgggctctattccattgcaattcaacctacgttaccgcaacgcaatgcagtactgttgtggcgccgtggtgcatatcgaagcgcggcaagccaagcgtttgccaatctcatcacacaccatttcgatgtacaccaagaaagtgacgatttttgataaatagaaaacacatcgcgtctgaccgcttcccttccgtattaggacagccaattcgtaagcttgtttctaatgtaatcagatgaaaggcgctcctgctctaaacgtgaagattggaaccggccagaaatgagatcattaaacaactttgcttcatcctcatttagcaatgtaggattagattcaactggatttggttcaggaaccattctatcttcatgagctttaacagttttaacatccatcatcagaggctcaatatccataaacttgtttctggcatcactgagaatagataaaccccaagtatcaatatctccccaataccctacacgcttacctttcaaccaagctgcatccatccaagcaatgtttttccccccgccgatcaccgctatcgtgtcagacatttcgggtaatgctaaaccagactgtaagttttcaactattaatatattcgatgccggaagttcatgccttctaagtaattcgctaggtatttgtagtatcggcattcccccaagcgcaacagttgcagcacggcaaagcggcctgatagttaaccagcctttaggatttattgaacatcccaaccaagcgataagaccacctgatgccgaaacagctcccttgtgaatgatatcggccagctcttcgatcaggatttggtggttctcaagaaacttagtatcaattccaatgagtggcagtgctcttagatattgcccttcccctaagccttgctttaattgtggcaacaattttgctaataattccgcatccctcaacgagagtttttccacaatatctatgcacttaaccaatgcaggatagagatctttatcaacccgcaaaaatggcttcatatttctttcccacaccttacttcgggaaagggcatcattccctaaaaattgaatcagacattgcatcgattcaatgacaacaaaagttggaatgcgctgttcagatagctccctgaaatttttggaagaccactctacaagatcttgatggggaaatgatttccactcatcaataaaccgttgaaaatgagctatatctaatatggcagaattccctttgggcggtttcaagccaacgcgaatagggaatgccttgatgcccagtaaccgggattttagtgaggaaaggttatcccactcacgttgcctaatgatgctcttaacttgtgatggcaataacccccaacgcacctcatactgccctcttttcatgtcagtttctcaaactcaatacccaaatcagccgcctcatcaggcaactttttctccttctcttcgcccattctccggtcaatctcttcccaagtcacttcacataaatggctgtcatggttttcctggtctctttccgcaatgagcagtgaacgagcagattctcttgccagattcaagttcttataaggcgtaatcaaattaacgtgaatatggagctccctaaatactcggagcacccgccgacttactgtttcagccgtatttgagaatgcttcatccaagaaaacagtacagtaaaccggtcgatcatagccatccggcgtcaaaacataggccaaacttgccgcgacaatagtcgccgcaaacgactctttctcgccaccggactttccactagatgactccaagacatcccgaatctcaccggtattactatccaactcttcggcataaaatgacatctgataacgaggatcaagcagccttaaactttccaatgtatttgaggagccaggggcactcgctttgccaagtatttcaactactttagccaattgacggaaccgtgcttcatggtcatcactggttacctgactcagcaccttacgcaaatgctgttcaaactcattaacatgcggaaatttctctctctttgaacctagctttaaatgtgtccctgatcgaaactctgtacgcttgaggacccggttaataatatcaatccgctcaaggatatcttcccgttcagattcaagcttagttttaatccgcgctagtgactgcgttgcatgcttattcaaacgttcaataaactgctccacaaggttgggaagcccttcctcttccagttgtcgtaaatgattaagataatcaggtaagccaccaatattactttgccagtcaaccgtgaagacttgccatttatcgttagatctgaatgagaccataatgctaatggctaatctttctgctttgtctttactgtttcggctaatatctaacagacgttctaaatcttcttcaactttcaacaccaattcagacatccggcctaaatcgtttgtattaagcacgccaacccgaatcgcaagtaattgtctggctgaatcaggtaatcctttcgacgcttttgcctgcgctttgctccattcttcttttgcatttttcagcgtatttttaacgccaccagaatcagagttgagctgatttaataccgattgaatttgaactagctgctctttagccgactcccaacgctctctggccttatcaagatcaccacctgactgttccaacatcttaaggtcaacctgcaaatcagaaagcttttcgtgccagtaaggagcattaatatcatcccagcggtaaccttggatcttctcccaaagaattttacgatcagaaacagaattcaaatcttgacgggcctgactcacctttttctcggtttccgccaattgcagagttaactcttttttatcgttattcagaatggctaaacgtgatttgtttgaaaaacccagacaccagcgtcttctgtcatctattcggtactgatcttttttctcaaagcgccctttatccatgtgcattaacccctgttgtgtcatcgaaaacggggtttgatccaattcttccgtgcttgaaacacattgcaggtcaaatcgttgcaaatggtgcttgagccactctcgataagggtgagtgcgccaaaccagtttccttagataaccatcagacttaaacaccaccgattggccttgagttgtagaattattcacaacttgaacacggacatgtaaacccgtatgccgagcgtttaaccaacgagtcaccattgaataacaatgatgtggcacagcaagtgttgttcgtaacccgcctaacgccctctctatcgcgccctgccagctcttttcacgatcttcgacatcgataagctcaccgataaatacacattgctctttacttaattctaaagaattaaccagttcatctcgcaattgctgatatttcacatcaatattggaatcgggtcttgcctcgatttcccgaatttcttgagagatatcatggatattggcttgtagctcactgaatttagcactgatggtggcaaacctgtcctgatactctccttcttcttgctgaatactggcaagccgagttgatgcggtggattgatttttgagaaataccgcctcctctaatacagaagggagagccagttcgttggcatgagtttgatattgagatgaatttctaaccacccgattcaactgagtttgggtatgatcaacttcctttcttagcgactctattttatccccaccaaattgaaggtactcctcgtgccttcgctcaaccagcttattcgcatccactttctgcccttcaacttggctaatttttagaagtagcgcttccagttcagcctcaatatcagtaattttttcactccacaattgtgcaaaaatctcaccaaagtagaccgggagactatttttctcagccattagctccgcaaattctttggttgttttttcgataattgagttgagttcaggtaacctggataagtgcaccttttgtgctcttgcatccactaattgactatgaattgccaccagatcagcaaactcttccacgacctttttagcatcatccttgaccgtactcggttccagtactaattcacgaatcaacccggttaaatcatcaatttttttcagacctaacgcccgcgataacagtgcaggcgcattcttattgtccatatacaggagctttcggtacaactcctgataatcagaaaaattatcatcacagcacgtaatcgtcggatcatcacgaagccattgcttgaatgcccgggcattaccgttcccaaaagcattaagcatttccttaagagtcagatctcttttggcaacaacataaacgcgtgtcacatccgcaagcacattcgtcgatttagtaatccagaaaagcgccgcaagcgtaatttttgacccatcatcaccctgatacaaagccctaagcccagtcaccacgccaaattcacgcttacttctgactctcgtccccgctccgtcatgggcagatccaaaacttccccgcatataggaaagtaaagtccggtcagaacgatcaccctgcgccgcagccacattaaaagttgcctttccggcaggaagcagcaaagccataaggccatcaataaatgtcgattttccggcaccattatctccagtgaccagcgttcccataggatcgatcaacgcggtatgcaagccattaaatgacccccagttatacactgagagttcagctaatctgatttgaccaacgtgaaataatgaattagccgaaagagtttgatcagtcattttcatctcctgtctattcctcttcatcttgataatcaacagcgtcgctgccatttttatttagctcaatacccttctctcccgccattttcaggtattcattaagcatgctttcgagaaattcagcgctgactacatagcggatcaccggcgtaatctcgaagcgatcctcgcttccccggaccgaactcaatatttttttcgtcaccattttatcaagagcgcccttgagttttcttcggtcagatttcgtgctgtttgtcagcggtaaaaacggtgtcagatgagattctatacgttcaatatcaatgataaccctttgctctcccgaagtttcccggtcctggtagtgtttacgcagcactaacagcaacaaggtatcgtataaagagagcgtccttcggctaatcagagagacaacctcttcatcatctatacccaatgattcagtatcttcctcattctgaaagccagcgataaaggcgacacctgctttttcatctaaaactaacctcaaatagacttctgacagatgtttgcgtacagcagattggtatcgacaaagtaattcaaacaatttagctttctgcgaagacaaaataacaccttgacgcagcaagctaaccagcacccggcgcgcatcaggcggcatatcactgtttgagttttcagcgtgcttactgactaatacatcatcagcctcacaggatgggctttgattgacaatcgaaaaagcaacatcagattcaacgccggctgtatctgtaagcgggtcatactctgattgagtatggtgttttatcaactgatcgaagaaccctgtcttctgttcttcctgaggattggaatcagacttaccaagggtagcgagggcaccattatctttattcaactttttacctaccatgcattacaaccctcactatatatatctctacaaccattttccattcaccatctaaagaaccaattcatccaaactgtctggaaacaggtccgcactcagcaagaaagtgggtatagacgcccgcaagcgagctccccgtttgtcactgatttcaactgattccttttcttccaataatgccgccccgacagatttggccactcttaaataggcaactaactcctccaaccctgaattaatcggctgataatttgcaatagacgcaatcgtcattggaccaaactcttttaacgtttctagcgccctctcagcgattaatcgaatttgaacaacatcaaggcaatccagcatttgcatactcggttcgcgagaattgagctgttcttcagcgtctgaggtatccagcttttcatcaggtgatttaagcagcatgctttcaggagagctaatacttgccgcgccaacgggcagtgacagcgttgttgccgtttgcaagtcataacctaagttcttcaattcaatggcgagtcgttccaattgaccaagcaatctatcaacagcacgattttcttgagccgtgccactctctatgtaagcacgcaaactctcttccgttcttcgcctgatttgaaaaactctgtcactctcgcggctcagttctctcatgagctgacttaagaattggcgttgttgggtacttaagtgttctgcgaccggacgacttaaaatacttcgaagctgatctcgtagctccatcgttctattttgatcacataacaaatcaaaaaagctttcaaacgcactaccggcatccgttttagccagtaatgcttctttttctaaaacagcaagaaggatatctcctctggtagagtccccctcaataatttgaatacgaatttcctgatccaactgacgaatttcatcttcaacacggcgaaaatcacccgttaaaacagaagccagttggtaaatttcacgaattctttcccgctgctcagccttggttaattcggtcacaacgccagccctcagagcatcaatctctctctgaatctcggattttctatcttccaaaaacgcgacacgctcatcggcatttgggctaatcgctattgcaaagtccctgaccgcttcctgcacaattcgaagatgagacgcagtggttcctgaattgcgttcatcaagcccttggctaaagcggagtgcaatttcactggcatccgttttagttaatgtgtcatccatctcacgcaaccagccttcccgaatccatttattgagataagtacccgctcctgtttcagtttcccaaaggccaagttcacgacagcgtaccagctctgcatcaagtgacacccgggcacgactaaaagggacttcactatcctcggaaaataactcccccaaaaatgccaaaattacaggagcattatcagctctcaacagtttccaggcagcgctttcctgaaatagacggcggtactttgcctgtaacccttggaaattcaacttgcctccctctatgtggtgataagtaaaaaaccaccaccaagaattttgtataatttacaatcgaataaaactatatcatcatatttttttattatgtcaacacaaattactggcttttaaactattcagcgctgtgacccatgggaaaattaagcttataagtccacccaattttgtgaaaaaagcagcaacatgatgaaaaacaaaaactgctagcgcagacagataataaggagataaacaatgcctcaattatcatcaacaagaaaagtagcaggagtaccctttcaaggtaaaaatgggcggtctggataaaccgcccgatgtaaaccaatggaaaattcctacgcgttactttctacggacaggcaaaccaataccacgcttcccatcttgcggtaaaaccagcacggctactgaccaagccggcagcgtgaccgtgccatctttcgcaattctggtccccgccgccagagatgtgtggcccagttccctttgaatatcattcaacttcaaccctttgacgttaagatctcttactgtggcaggatacggagccgcattaatcatcaccaccaaaccgtcaaatcgcgaatcacggtcatcacccgtagtattaccgtcatctatggtcatcaccagcaatccaagctgctgatgcggcccaacgttacggaaatcaacacgttgtttaaccgatgtaccatcaccaagcgtcatcagtggtgaatattgacgcaaacgcagcaattcctgataaaaagccgtcatctgtaataattcagtccggcccggtttatctaccacatttttcactttttcaatcaatgcgtaattttcgccatcaacacgctgatccggcataccaacatcatagttgttatcctggtaggtgtagctaacacggttaaaccaatcgccggaattataggaatcacgggtaaaagattttgaacgtagtagctccgatccatgttgagcaaaggccaatccttgtccaaggaatgtcgtggcgagggatattgcctgcatacgaacccgtgttgccagattcgcctcacgggccgctttgtagctgattatatcccacagcgtttggttatcgtgcttagagacataattaatcacctcaattggatcagcggcataaccggctatagcccctttgtagttaatttcccgacccgtttttaccgccccatctttattaatcagcacaaaatcagccaaattgcccgccatgccaagacgtaccagatccgccagatgacgcgtctcattagcatctaaccaagccatttcgttcagtaacgttcccgcaccgttgcccaccccctgattaatacgaatagtgtcagcagaatcaaacggcccaccaccttgtaccgcatcgcgcagtcgatcagagaaagtaccaatcccagtgcctttaagattaatctgtgaagcaatttcgaaacggtcatcctgcccagagttccaaccttcaccgaagaagtagaccgatgggttaattgcgcgtacttttgccagcgccgataacatctgcgccttaggatggtagcccattaagtcaaatcgaaacgcgtcgattttatagtccttaacccaagtcaccaacgagtcttcaatgagtttagcgaacatgcggtgctctggagccgtatcgtgacaacaagtgttagattcaacattgcccgtgatctcatccaaacgatgatagtaccaaggcactaccttatctaatactgaggatcggtgcgccggcccggctgcgttggtatggttatacgccacgtccatgatcacattcatccccaattgttgcttgatggcctgaatcatggcgcgaaactcgtttatacgtaccgaaccttccgcatctgtagcataagaaccttccggtaccgagtaatgaaacggatcgtagccccagttgtaggagtcggtttctgcaatcattgcattcagctcttgtacctgcgggttattggcgttgtcaccgcgctgcaatgcctgtaatacctcacccacagtctgtgaaccactgcaataattcgcgaagcggctatttttcacccttgggttaacctggcacaaacggctaaacgggtgattcagatcagccacttcattgctgaattcattaatggaagccacatcgaataccggcaatagctccatatgagtcacccctgcctgactcaatgtcttaaggtgtttgaacatatcgctgttgtcagcggtgagagccagatatttacctcgccaagtttctgttaccgtgccatctgcaacagagagatcacgaatatgagcttcatatatggtcatacgcgcaatgtcagccggtgtattttgcgaacgcggcatgatcaggctatcccaattttgtggtttcagtgcctcgtcatccaaattgatgacttgactgtactccgaattggtagacaaactgtgggaatagggatcggtaacctcataatgctccacatgacgggaatatggatggtataccgttaaagcatagcggtagtaagcaccaaccagctctttatcaccttgccatgaccaagaaccactagcaggatcacgcttcattgcatgattggcaatgatctgtttatttgcatcatagataaccaacccaacatgctgagcagtcggtgcccacaagcggaaggtaacaccggtatcgttgattagtgctccatattctagggtgtcagcaacgttagcgaagcggtcgtccagcacaccagccgtttgtacttgagtcgccgacaatagcaagccagcttcattggtcgccaacgccaccaactcaccggtaagcagtgtatcaacatccgtgtcctctggcaggtggaacgctgttaacttcttcaagtgcgggaatcgctcagccgtcttctggctcagagtcgtcggcgttaacgtcagatagctatcgatgaaatttccttcatcattagcttccaccttgccattccggttgtaatataagcggacatagggcttatccgcgccacccgaccataacaacgtctgattatcgacccaatgtgccgaagcctgagaaacgccaaacacagaattaaaggctgccgcacgactgccatagatttgataattgccgggtatcacagagacggtacggttactgaaatcggagaaggagattttcaggtcactgtcgatcaatttattattgttaccatcacgcacgataaaattgatacagccctcgttcttggttaacggtatcacccagtaaggcccataactatcgctacccgtcggagttgcactggtgtcgttccagcttgatgaaagggaagccaaggcatcacaatttttatcgttccataagtagagggtgttggtactgtagtcacggttcgttgttgggctttgacttaatttagcaatgtccaccaagtggatcactgcctgaaaattgccggcagtggcagcttcactgggtactttattagggatatgcgccatcggtttctccggggttttgggtaaagaacgattgttatcacagctagccagtagcaaaacgaatgtactgcttaatagggccaggtaagcccttttccagaagggagctaccataatcagacctttttaatagaaataaatcgtcgccgatattattgttaataaaataggaatgaaatattaaataatgtctcagatgagtcagcatcctcctagctttgatactaagagggaggaggagttaggaggagatactttttcgtgatattgcgcacaataataatgtaatgatcttttattacataaggctggtgtgaatttatttatattattccatcagatacaggttaaaatgatgtcaaatacagtcatttttatatattttcacaaattttattgtttctgcaaaaaagcattttttgtgatacaaaatcattaagtaattcctttcctcctaatcctgcatgtttcttgcattagatatatacccgccatctttcaagtttcctctttgttggctgcactcactcaccccggtcacatagtccgctatactctcggggattcactcccttgccgtcgcgatgcatcttgaaatccattgggtatataaagtcgctattttaaaataaagctgaaactaaacatgacctattaaccataaataaaatcaatgagcggcaataacttcattccagttattgcctctgtgcaaattatgataatggaatatattaaacctaaactctacattcctaagtagaaatagatatttaattcattatcgttaccccgtacattttataaatcgttatgattaagataaatctgatgaaattttctgaattgcatcaaaagcacactgttgatctaaagaaccactcggagcgccaccaataccgattgcaccaatcacttgattatcactagatttaacaggaacaccaccaccaagtaataggaagcctggaatatcccctaaatattgagcaccaagatttgattgcgccgttttcattacgtcctctgacgttctctgagtagataacgcggtataagctttcattttgctcgcatcaacggtatgcaatccggctttatccatacgctgaaccactttcagaaccccacttttatcaacaacagaaaccgttacgttgtagttattagccgcacaagattgaattgcttcagaagctaatttatttgctacctcaagagtaatattacgttcagtaattagtgatgaagcaaaagcagattgagcgaataaacctgctgccaaaacagtatagaaaagagaatgtttcataggtaaacctcattaagtttaagttgatgaattatcctgttctaacttaatgagatttatcggctatagctattcggccaattacttattcgactcagtagaaatacttagtcataagataatgacttaaataattcatactctttgactaactgtggtaaagaatgtatatccaatttatgaaatatattggcacgatgaacctcaatagtacgtggtgataacgataactgttgagcaatttgtttgctggttttaccttccaaaataattttcatcacttccctttcacgttcagataattggctaaatttcgttttcaactgctcatatatctgacgttgcctaaatactttctgatgaaataataatgcacttgaaactgtttcaattaataaatctgcatcaataggtttggttaaaaactcgaaagcaccgtttttaaaagcgcgacgacaaatatcaatatttccgtgtccggtcatgataataaccggtaatgtactattaagttttaaaagatcggcctgcaatgccaatccaggttttcccggcatacgaatatccaataaaatacacccctgaagcactgcaatattctcgctatcaattctatcaagaaattcttgcgcaccaggaaatgaacttacctgccaattcattgtttctaataacatagataatgagtcacggattgcttcatcatcatcaataagataaattactgtcgccattatttctccttacctttattagttggtaaccaaataataaaacgcgctcctcctgtttcacaattttcagcattaatatcgccaccaagtttatgaattaatgtttctgttaacgtcattcccaaccccataccttgctggcgtgttgtgaagaatggaataaacacgttctttaaagcttcatcacttaatccagggccaccatctgttatcatgatttttatcatgtcatcgatataggtgatatcaatacagatccaattttgatattctgaccgaccttgctcttgctgtgcctgaatggcattgctgattaaattatgaaatatttgttcaatccacagcggttcggcagatatcattggtagttcatcacaaatatgctttattatcttgatcttaccgaccttaatttcattttcgagcaatatctcaactcgacctaatatcgtttgaatattcacaggttgtaaaataatattaccggtcgtcagtttttgacggtattgcgttaataaatttgcgatgcgttgagtttgcaaaattgatgaatccaatattggcgtcactttatcatattgctgctttttcattaaccgcaatgcggtttggttataactcataatcgcagtcaaaggctgatttaattcatgaacaacacctgttgccacttcatccattgtatttaatcgggtaaattcaaagaaatgtgctcgtaaatcagaaattttcctcaaccttttattcttctgaattaaaaagataaaacagataatcactgcccataaaaagctcagacaagcaatataaccccacggaattttagaccattgttgatcgttacccactttaagcacaaaaggctgaaaacgattggttaactttttctcccagcgccaaaaatagtgatctttctccagtccatacgtaatcaatgggcgattattccaatccagttgtaccattcgaaattgtgacaataatgatagatcttttatcaggatattaagatctattaataaccggatattatcacgtttactattaagccaatatcttccctcttcctcttcactgactatagggaatattaatacattcattggcatctcttgtaatccgacgatttgtggaaagttttcctgtagctgctccaattcgatattagtatccgttagcgatacaatcgcgtcatgttgtgccagcttttcactcagctctcgataaagaatattaaatgaaactgtttgttgttgataattctgatttagtgaatgattaatcattccccaaatagtcaaacctgttaacacaatccacgccaaaaaatgccacatatgattacctgaaaaaatatctttcatgacgttaaaatacagtcagaatatataaaggaaacggctattaaacagaatgagttgaattctagagaacatttggcattgagcagcatattaaaattcattatagcgtgattatttcatcaaaacatttcttaaaataaatagttggctatggtaaatgaaactccagctctagcttattttgtctaagcatattttagctcctgatcaaattatttcgacagatagaccccagatatgggtttacgataacccctgtcaaagctcttaatatcatgtcaaatttactgaataatctaagataatcacccaataaatcgacttggtgaaaggttttctttcccttgggtatcacaccgatatttataaaaatagcaatatttatcaataagttgagatgaaacctcatcattattctatatttgaccagaaaaaacgctttacaatcgatagtgataattattatcattcgtatcgctttcagatgaactgccttcggggtacagatgaaagcacgacattgctcacattgcttccagtgtttactttagccagccaagtgctggcttctttttattaattcatccaatcatccattgttcaaaatatttgaatttttaagtcaagtttttaagctttaatgctatctcttctcaattagactgtaaaaaccattgaggagatttgaatatgatccatttacgcaaagcatcagatcgcggccatgccgatcatggctggttaactagctggcataccttctcatttgccagctattacgatactaattttatgaatttctcagcattgagagtcattaatgaagatttcatcgaagcaggtcaaggttttggtacccatccgcataaagatatggaaatactgacctatgttctttccggtaccgttgaacaccaggatagtataggaaataaagagcgggtacctgctggtgaattccaaattatgagcgcaggtactggcattcgccattcagaatacaatccgaacagtgattgccaattacatctatatcaaatttggatcatcccaagtaaaacgggtttaacaccgcgctatgaacaacgtcgctttgatgatgtacaaagccgccaactggtgctctcgcctgatgcacgggatggttcactgaaagtatttcaggatatgactttatggcgttggatacttaaggatcacgaaaccgccgaatatgtcgcagaaaaaggccgttatatttggatacaagtcattcgtggcgaagtgacggttaatggtgtcaaagccaccaccagcgatggtctggctatccgagatgaaatcaatcttcaacttagcagcagcaacgatagtgaaatattgttgtttgaccttcctccgacataaatatcaaataagcctcaccctaacggatgaggctaaaaaattcacaattacagtttaggacccgctttcactaaagcttcccccgccggggtatcggtatatttatcaaagttgtcgacaaaacgatgagccaaatctttcgccttctcttcccattgagatttatctgcataagtcttacgtggatcaagaatgtcggtatcaacacccggcaacgctgtcggaaccgccagatcgaaaataggtaatgtaatggtatcagtttcttcaatatcaccatttaggatggcatcaatgatcccacgggtatccttaatcgagattcgtttacccgtcccattccagccagtattcaccagataagccttagcacctgcggcctgcatacgttttaccaacacttccgcgtattgggttggatgcaaagtcaggaatgcggcaccaaaacaagcagaaaatgtaggtgttggttcagtcacaccgcgttcggtacctgccaattttgccgtaaaaccagatagaaagtgatattgagtctgttcgggtgtcaaacgagataccggaggtaacacaccaaatgcgtccgcagtcaggaagatgaccttagttgcatggcccgctttagaaaccggcttaacaatgttttcaatatggttgataggataagaaacacgggtgttttcagtttttgaaccatcacggaaatcaaccgtgccatctgtcagtacagtaacattttccagcaacgcatcacgtttaatcgcattgtagatatcaggttccgcctctttggacagattgatggttttcgcgtaacaaccaccttcaaagttgaatacaccgtcatcatcccaaccgtgctcatcgtcaccaatcagcttacgttttggatcagtagaaagtgtggttttacctgtaccagacaagccgaagaagaccgcaacatcccctttctcacccacattggcagaacagtgcatcgaggcaatacctttcagtggcaacaggtagttcatcatagagaacatccctttcttcatttcgccaccgtaccaggtaccaccaataagctgcatacgctctgtcaggttaaacgcaacaaagttttcagagttcaaaccttgttcttgccattgcgggttggtgcattttgcaccgttcatcacaataaaatctggtttgaactcagccaactcttcatctgatgggcggataaacatgttcttaacaaagtgggcctgccacgcaacttctgtgataaagcggactttcagtcgtgtatctgcattagcaccacagaaagcatcaactacaaacaaacgtttgcctgaaagctgcttagttaccaagcctttcagatatgtccatgtctcctgctgtaatggtttgttatcatttttaccttttccctggtcagcccaccatacggtgtcacgggtgacatcatcacgaacaatgtacttatcttttggggaacgacccgtgaagatccccgtatcgacagccacagcccccaggttggtcagagtgccactctcgcagccttcgagtgaaggtttggtttcttctgaaaataacaactcatagcttggattataaataatttcgttaacatcatggattccgtaacccgcgagttcctgcggggtaatgcctttaacactcatgtcattgctcctggtgggtagtcacactttttctgtgagcaataataaatagttatgattaattaacagcgatagttatcaaaaaattgaaaacccaccatttttttaagtttgatcttgggccaaaggcacgaaaacagttttgagtattatgatggatttgatagaaaggcgcggatccgcgccttaaaaggtgaaaaagtgtgtttataccctatggaacggatatagatagaatatcaatggagccggttctttttttctattctgatcgcagcaagatcatcagcatcaaaaatatagtgcgtgccgcaatactcacacgccatatcaatgttgccatctttctgcaaaatatgattaacatcctcatcggaaagtgtcactaatgtgtcagcacaacgttggcgagagcaagtacaacggaattcaaccgcttgcggttcatataatatgacatcctcctcatgataaaggcggtgcaagatctccttaacttccaatgaaaataactcttcacctttaatggttgcagtaagttgcaccagatgatcaaaagcttctgcactcccctgttccgctgttggcagaatctgtaacaacatcccaccagcagcaactctgccatcttgaatgccagtacgaataaagagacgagtcggtagctgttcagactgtctgaaataatcatcaagacaatccgccaatgtttcaccttccagtgcaaccactccctgataacgctcaccatgagttggcgtaatggtaataaccatatagcctgtacccaccatctgtttcaagctgctattttcagccactaatccatcaatacgagcaacaccacgcatttgttgctgatgattaccattaataacggctaatttgaccgggccatctccctgaatctggaccgtaatatcgccatcaaatttcagggttgcagttaataggctggttgctaccaacagttctcccaataattgctgtaccggctgagggtaatcatgattttccaaaatatgctggtaagtttcactggctaaaaccagctcaccacgtacagaataattcttaaataaaaagcggtgtaattggtcttgtttaaacataacaatctctcattcgagcaggttattcctgcccatttaatttggtgtttttaaacttaatcagcgtgcgtctttcttttttatccggccggcgatcaggatgaggcatagttaatgcattcatttttcgagcaattgccattttttcccggttagtcatactcgcttccgtctcttggtaaagttgttgcgcctccggcgcaccgcgccgatgattgcttagtacaagaacttcaactatacgttcatcattaccctgacgcagtttaatttcagcccctagctcaaccaatttactcggtttacttctttgaccattatagtgaactttaccaccgtctatcatttcccgtgcaatagcccgtgttttataaaaacgagccgcccacagccacttatccagacggacagcttgatcggagtctgaattacccttcatttttcctcctactatcagctttgatcagctttggcaaataacccaaagcctaacataccattgtcgattatcgccaacgcgtaggcggaaaaagtgtattaaagcagttatcgtaatattgcttgattttgtttagacgttgtttgttctgcctatttttcttaacaaccagcacaaaattaatgattaaggtcgtaaaaagagccaagaataaaatagtggtaccaatacaacgagcaagtgtcatggcatctagttcactatgcagcacaatccgacgggttccatgactatctacggacaattccgtgacaattcccgttgtctcaaagggtgtttgcaataccatatccgataaccgctgtaactcacgccattgttccaacgcactatggtcttccaacacactatggtcataagagatgatggccggcgttatatactcaaccagttgtttgccttcatcactgataagtagaactccgccaggagaagggctattaagcagcattgcgactttatctatttcccggtagataaatgatgatgtcgtcgcatcaaccaatttccccaaagcttcagcgcctgccggacgcaataaaacatgagtgccatccagtttgccactttctgcattctttaacaaagttagccaatcaatagcactacccaggttaaccaaagcatttttcaatcgtaaacagtctgcttctttctcacataattctttagttttcaatacaatatcagagaaattatccaataagatcataccagatttgaaaatctcctggggaaggtctggatttattacatcgttattttcctgtaaacgtaattgcttattaacagttgcaatcagtttagcggcattttctataatttctgattctggtattggcagtggattaactctattccaatatatccccgagcaatcgaacggagaaaaataggtgtcgcctttaccgttcatattgtttgggggcatataacacataccaaccccttttgctttcaggatatccccaactcgcaattccatcccttccatcatattagcgtcagtaataacttttgtgctgctgccatgcaaccaagcaaaactgagtttcatcggtacactaaccggctgataaaaatagagtagtaacataataagcaagcagctagcgatcatcatgagattttttccataacggcgataagggtaatttttctcttcatcatgcaaagagagataatgcccttgcctgactacctgaccgttagtgtaaatatcaatactggttttctgatcaaaatagtaagcaacatagggttcccaatgaggaggatagattaaatcaatcccaccaagagaaatattactcatttgcccttgttcaaattcgccaaataatccccatcgtttgggtataccggtaaaacagtgaatatcctggcgcctgcatattgaaagtgggcaaagtaatggccaaaaactgacaacgactaaactacctgcaatcaacatcagccacggcaaaagcagtgccggtgaaagtaacgcaaaaaaccaaatgaaaaatccgaaacacaaaaatcccccttcccaaatacccgatgagtgattcaaccggtattcttccaaggtctctttacgaatattttgtaactttacgctggtttcaccatttttttggatcgatgcctgctgatgcgatatatctgcgattaccggagcagaaggaaaatcctgttgaaaatctttcagaaagtgaccattaatcgaaataaccagtggtattgtcgcggtgtgaataacatcaataatattctgctgtttaataaaaggctcaaggaaaaacggcaaatgaatttctgccatatcaatataataacgccagctatgtcgttcatctgaggcaacagaaaaccgggtaatggaatgacagatagtataaaccatatcatttttacccatcagaattggccaacttgttttattaatacggtttgttacaactggcggcaacactcgattcaaataacattcaatagcctggtattcatcagcattaagtttacgataggtcggtgcagcaacagaaggcagatagcggtcattatcatgtagcttccatttgaagatcagaaaggaagccatgacaatcaagctaattatcaagatagccaatataacgactgttacgctcattttatccccatacccatgacaatcttactattgttgtttgcaaattagcgactacacattaagttctgaattaggttatttctatttatttttttaatttattttacaatgagttataccctatggatttcaagatgcatcgcgacggcaagggagtgaatccccgggaacatagataacgatgtgaccggggtgagcgagcgcagccaacaaagaggcaacttgaaagataacgggtatatatgataactcgctaaactatatacaacatagatctatttccagagaggataaagataacagtaacaacaataaccagcgataatcactatcatttatcaaaataatcggccatatttagtcaagctatggagtgtacctaatttcatcataaaatctaaggttaatgaaataatttaagacgtaataatgcacaggcactcaactcaaccaatattaaaccatcaggggcaattatgaatgacctgaaaaaccctaaaatcctcaacatagaggacattgcccattcacgtttatttcatattcagtcagttgatctcgaatttagtaacggtgtaaaacgcgtttatgaacggatgcgtccggccaatcgggaagctgttctgataatcccggtcattggggaggaattgttgcttattcgtgagtatgcagtcggcattgagcagtacgaattgggctttcctaaaggcgcgatcgacccaggggaaagtatctttgaagccgctaaccgtgaattaaaagaagaagtcagttttggtgccagaaaaatagaacaattagccaaactcactatggccccatcctatttttctagcaaaatgaacattgttattgccgaaaatctctatccagaaagcctggaaggggatgagcctgaaccgctatcacaaatacgttggccaatagcagatatgatgtcattactggatcacgctgatttcaacgaagcacgcaacgtctgcgccctatttctggcacaaaaatacttaatacaccgttgaagttcacaggcacaacagcgcttccgttgtgcctgctctatcatcagaatagctcctgactttcaccattctcaattaaaattgtgccaacttcctgcaccgcactttctgtaggttgagtgccgtcaatgaagtattcactacgggtatctccgccgccgccagcaagtttacctgttttacgatctatcacggcagaaacaatccccggaggaggtgtaacttctttttcaggaaccccctccagtgcaattttcataaaatcatcccaaattggctgcgcactcttagcacccgcctcaccgccactggctgctgtacgaccaaggcttctacggtgatcatcaaaaccaatccaaaccgtcgtgacaatatccggcccataacctgagaaccaggcatcttttgaactattagttgtcccagttttgccaccaatatcacgacgtttcagatcgcgcgaggcgcgccaacccgtaccagaccaacccggctcaccaaaaatattgctattcaaagcatcatggatcaaaaatgccaactgagtactgataacatgaggagcatattcttgcgcaccttcacggccatcaatgaccggtgctctttctaattcaggtaacggcaatatctcttgctggccaacatgagattgagcaacattctctatcgagttttcagaaagttcgattgaacgtaccgtatccccataaattactggaatatcgcactgcggacatgcaattttcggtttagcctcaaagagaacatcgccatcttcgttttcaatcttagtaatgaagtaaggatcgatcagatagccaccattggacatgaccgaataccctcgtaccatttgcattggagtgaatgatggtgatcccaaagccagagattcggtacgtacaatattttgtgccggaaaaccaaaccgttgcaggtaatcagcggcataatcgactcccattgctcgcattgctcgcaccatcacgacgttcttcgattgccctaatccctgacgcaaacggattggcccaacataagccggtggtgagtttttcggacgccagtcagtactagctcctgcatcccaacgactaatgggtaagtcattcaacaatgaagctaatgtcagccctttatccatcgctgcggtatagagaaatggtttaatattagaaccaatttgacgtaatgactgagtgacacggttaaatttactcaagttgaaatcaaacccaccaaccagcgctttcacagcaccatcattcggatcaatagagaccaaagcagcattagcttccggcacttgtgccaaccaccaaatatcctttactttccgaacccaaacctgttcacccacttgaaccacttcattcacactacgaggaaccgcaccctgtgcactatcagatttgaactttttggcccaacggacacccgcgatgggcaattctacactgctgccatcaggcaacatcactatcgcctgatcagtacctgctttggtcactacagccggcattaacgccccataacttggtaaggtcttaagcttcttgacaatttgttcccgatcccaagcaggttcacccactttccacaaaacttcctgcgccccacggtagccatgacgcacatcataatcaatgaggttattacgaaccgcatccacggcagctaactgaagtttacgggtaatcgtggtataaaccttataaccgtcggtgtaagcattctcaccataacgctcaatcatctcctgacgcaccatctcggacaaatagggcgcagagaaagcaatctgaggtgcatgataattcgctaccagtttttcacttctagcttgattatattgctgctgagtaatatagccctcattgagcatacggctcagaaccacattccggcggttaatcgctcggccataagaataaagcgggttaaacgtagaaggtgcctttggcaaaccagcaatcatggcgatttcactcagtgtcaactcattgacactcttaccaaaataaacttgagccgcagctccaacaccataagcccggtaaccaaggtaaattttattgagatagagttcgaggatctcatctttattcagcaattgctcaatcctgatggccagaaaagcttccttgactttacgcatcaacgtcttctcaggagtgagaaagaaatttctcgccagttgctgagtaatggtacttgccccttgtgatgcatgacctgaactcatcgcgacagaagctgcccggataatccctacagggtcaaccccgtgatgttcataaaaacggctgtcctccgttgcaatgaacgccttcaccataatgggtggaatttcgggcagctcaagaggcatacggcgcttttcaccatattgagcaatcagctcgccatctgcactgaacacctgcattggtgtctgtaatcgaacatcctttaatgtcgccacatcaggtaactgaggctcgatatatttatacataccaaaaatcgaggccgttcccagaaaaatgcaactcacaacaaagactagaaaatactttacgaacttcacctgaaatttcccatgccatgttagtcgggtggtttataaacaatcggcgcgtagtataaaggttacacagcaccttgaatatggtcttttattaaaattactgatatggagatcgatatatgtattcaccaaaatggtatgtcggattggacatccaaaatggcatccttcgcgccgtcgcagctataaaacgccgagatggctggcagcttcgccactgctggcaatatcttttatctgatgcggtcatgccagagggccgtttacaacggccagaaatattatgtgatattttaaatcaatggcgccaagaattacctaaaaaaatcagtttcaggctcgccctacctgtacaacaaacattgcagaagagtctgattttacctccagatatcaatcttaaagagccggaacaaggctggtttatcaacgccagtgccgagaaacaattcccctttaatacccgagaactggcgctggattaccgtattattgaacaaaacgcctacatcagtgccgctcgccagaaagatctcaacctctggctacaatgtcttgcacaagcaggaatatttccagacgccattgatattgccccttgtgccctacgctatatagcacaatatgccggcgttcccgctgatagttggctgttacataggcaacaatctggttggctatgggtatctcctgccaatgcccccttcgcttatgatttagtatcagcaaatacggctgtttctccacagcagattatccgtcaattatctgcttcatctatggctgaacagccggtttactacagcagctaccaacaagaagctctacctgaaggaacttattcttgggatatgttgacagcatttcgtcactatcaaccaccactgccaatccaactgatggaatatgtgatagccggtggtttagcactcagaccggatgataagtaatgatgtatcaggttaattttctaccttggcgccaaacccggctaagacatcgttatcgttggtgggcgattcttctcttattgcaattgatgttgtggctgacagtactcgtctggatgttattaaaacagcaggaaacgattaaccagtatcaaagacaatggcagcaactcaaccagcaacaattatatttgcaacaacagataactcagacagaggaggcggtcaatcttcacaacaaactggccgataaattaaaacaacaacaaacgtggctgaaacagaaccaacaacattggcaattatttaatgaattacctgaattattaccagaaggaagttggttaaccgctttcgatgatcaggcaggccaattaaaactggttgctaatagtctggattattccagtatgacgtctctgctggataatcttgaaaacaacgggcaattgtctgaaattcaactaaaaaagatgaccactaccgaacaacaaatcaggcaatttattattgacgctaactggcagacggagatatccgatgataaaaagtgactatctatggtggtttgccaaaccaacctggctgctctttatctggcagcaagctatcatcatgctatttctgattctgttttatcttttcttctggcaagaaagaactgaacaacgaagtagcctggcgcaaaaaatagcagcccaacaaatcaataccaaagcagccaatgaacggctaaatcagctaccgctattgggaggtatacgacaacacatcaaccaaatagaaaataaactcagtaagccgcgacaaaatgaggtaaaaattaccgcaataaaacaattacaacagccattgataaactctggtgcgcaagttcttgagtggcaacgtaaaaaagaaggggaaaaaacgctctggcaaatcacaatttatttgaactacgaacagatgctgagttttcttgaggcgttacaaacgttatatccaccgctgctaattaaacagctttccatttcaccatcaggtgaatctctaaacgtcaaaatcaccctgtcagaagcctcacatgaggaattttatgactaaaaaatttattctattcatcctttttctgcccgctattgttgttgcagaaataagaaatccttttgttcccccgatgatagagacagaagagcaatcggttgagttatttgatcaatcagtcaatgagaccgaaattcagtccctttcaaccgtattacaatatgcagatgcagaaagaatcgccatgaatctcaggcaaaatacgcccgcactgataacaaaagagggtaaagttgattttgatcctgaaactaacagtctgattttacaggatacccccatcgccatcgcacagataaaaagctggctgaaagagatagatacaccacagcaacaagtgcagattactgcacatatcgtgaccagtagccgagaagcattacatgaactcggcatttactggggtatgccgataggagagcagattaatacatcaacgggtataaaccgcctcaatatcaaccaagcagccaacgataacatgcatcgatttgcattcaatattgcccgcattcacaccagtttgctggaaatggagctcagtgccttagaacaagaaaaccaactagatattatcgctagcccaagactaaccgcctcacatcaacagttagccagcatcaagcaaggctctgatattccctacgtcagccaagaaaaagagaaaagtaccgtgcaatttaaagaagccgtactaggaatggaagtcacaccccatatactgagaaaaaacaaaatcagactctctctaaaaatcagtcaaaacatgccagggatctcaataagtcaaggaggaggtgaaaatttaaccatcgacaaacaggaaataataactcaagttactgtaaaaaatggtgaaacacttattctcggtggcatttttcaacagaaaaaaggcgagcaaacccaaaaggtcccttatctatcagacatcccactactcggctcattatttaaccaaaaagctcataaacacagccgacgtgagttagtcatatttatcacacctcaattgatggacatttgatcaaaaataaaaatataaccgttatatcagtgagttggatataaaaaacttaactattccgtatgatgatgcgcagatttttccaactaatcctgtttatagatttgacgctgagtccaatttagcatacaagagttaactaattgagtggtcgggtttaacatcacaataatcagccaatgaaaccagagcttccgtcacaaaaagctcgtcgttgatttatatagttgcaaaactggctgatgtactgagataattttgttatctgatctcacattaccgctcatgaggtttcagtttaggtcccgctgctgatttgattagcggggcgggttatcattaacgaatagtcttagtaataccaaaaacatggcagagaaacgtaatatctttctggttgggcctatgggtgccggcaaaagcactattggtcgtcagttagctcagcaactcaatatggagttttacgactccgatcaagaaattgagcgacgtaccggagctgacgtgggctgggtattcgatgtggaaggcgaagaaggcttccgcgaacgcgaagaaaaagtgattaacgaactcacggaaaaacaaggcattgtactggcgactggcggaggttctgtgaaatccagagaaacccgcaatcgtctgtcagcccgtggggtcgtggtctacttggaaaccaccattgaaaaacagttagcacgcactcagcgcgataaaaaacgtcccttacttcaagttgatgcaccagcacgtgaagttttagaaaatttagcaaacgaacgtaatcctctgtatgaggaaattgctgatgtcactatccgtaccgatgaacagagcgctaaagttgtcgctaaccaaatcattgagttactggaaaaaaactgattcaagcaagtctgtacagcgataaataattaaggcgaaggctgcttatggaaaagatcactgtcactttaggggaacgtagttacccaattaccattgcaaaagggctatttgacgatccttctgcttttgcaccattaaaagcaggccagcaagttatgctggtgacgaatcaaaccctagctccgctgtatctggcaaaagtaaaagctactttgcaacaagccaggattcgggtagatgaagtgattctacctgatggtgaacagtacaaatctctttctgtattaaatgacgtattttctgctttgctggaaaatagccacagccgggacacaacacttatcgctctcggtggcggcgtaatcggtgatttaactggttttgccgctgcctgttatcaacgtggtgtccgttttattcaaatgcctaccacccttcttgcccaagttgattcctctgtcggaggaaaaaccgcagtaaaccatccctttggcaagaatatgataggtgcattctatcaaccagcctctgtgatggtcgatctcaactgcctgcaaacgcttccagcccgcgaactctcttccggtctggcagaggtcatcaagtacggtatcattcttgacagcgcattttttagctggcttgaagataatatggataaactcctggctcttgacaaccaagcaatggctcactgcatccgtcgttgctgcgaattgaaagctgaagttgtcgccgcagatgagaaagaattgagtggcttgcgtgccctgctgaatcttggtcacaccttcggtcacgccatcgaaacagaaatgggatatggtgtctggttacatggggaagcagtttccgccggaatggtcatggcagcaagaacagctcaacttattgataatttctctgaacaggatactcaacgtattatccgattgttggagcgagcaaatctgccggtacacgggccacaaaacatgccaccagaagcctacctcccacatatgatgcgagataagaaagttatagcaggtaaattacgactggttcttccaacaaaaataggtaaagctgatcttcgctcagatattgaacacaactgtgttgttgacgctatccttcagtgtttaccgtatgaaaatgtgtaaattttaagtaagttgtatgcttattgtatcatatcctatggatttcaagatggatcgcgacggcaagggagcgaatccccgggagcatagagaactatgtgactggggtgagtgagcgcagccaacaaagaggcaacttgaaagataacgggtataaatgtttttttgcatacatctggttgttgtgtcataaaataacgactctatcagacaaatttctatcttcgttaagtcagcctgccggactgacttcaattgcaattggcagtacttggctctgtttggagggcatatggacgaattcaaatcagaaaatgaacaaagagcaaataacgagtttaggccagatacctcagatcgccgtccttcacgctcgcgtcagccattaaacaaacccaaatttgcagtttcacgtcagcaaatgatgctcggcattgggattttagtgctgctactgctgattattgctatcagttctgccttaaaagccccaactgaacatgaaaaacagcaatcgccaaatgttgctgagaagaatattgatttatcaaattcatcatccaacaacgatgataatcaatccataacatcagagaataccaccacagatacaatcaacagaccacaggaaatccatgttcctcctgtcagtggtacttcaactcaacctcatcagcttcaaactaacaatggcaaaacccaaaatcagcgcattgaattaccaggaaatattcctgatgcactgactcaacaacagagtaatataaatcacgcagtacagaatctgaatcaagcccaacaatcacagccagtaacaccaccaccggtggtacagcagaaatcagaaaatatccgtccactgaaatcagaaacaccggctaaatcaaaaccatcgacaagtcatgctagcagtaaaaacaatgtggtcagtagcaccagtagtgatcaattaaaaaccccggcaaaccactacactttgcaattaagtagtgccagccgctcagatacactgaccgcttttgctaaaaagcataatcttacccattacaaagtttatgaaactaaacgtaatgaaaaagtttggtttgttttaattcatggtgattacccttccgtttctgaagccaaacgggctgtttcatctctaccggccgagattcaggcgaaaaaaccttgggttagaacgatgcagcaagtgcaacaagatctaagaaaataaaacaatatttattaggcgctgatatgctgtcctaaacagagtacaatctgcggctctggaatgattgagtaattaattgacagcatgaaaaaaaaacgcgctttcttaaaatgggccggtggaaaatacccgttggtagatgatatcaaacgtcatctgccagccggtagtcgtctgatagagccatttgttggcgcaggttctgtctttttgaacacagactacgattcttatatcctcgctgatatcaacagtgacctgattaacctgtacaacacagtaaagctcagggctgatgagtttatagtccacacacgccctctgtttacccaagaatacaatacagccgaacatttttatcagttacgggagcaatttaaccaaagcactgacccgttccatcgcagcgtattattcctttatctcaatcgccattgttacaacggcctctgtcgttataattctcatggtaaatttaacgtaccttttggccgttataaaaaaccctactttcctgaagaagaattacactggtttgctgaaaaagcccaaaatgcgacttttatctgcgagcactaccaacacacgttgaacgaagcacataaagactcagttatctattgtgatcccccctatgctcctttgtcagcaacagcaaactttacggcgtatcacaccaatagttttaacattgcagatcaggaaaatctggcaaatattgcatttaagttatcatcagaacgtgcaattcctgttttgatatccaaccacgatacgccaatgacgcgaaaatggtactatcaggcttcacttcatattgtcaaagcacgtcgtactatcagcaggaatatccttgctcgcagtaaggtagacgaacttttggcattatatcgctgatttatccactccccttttgcttggcaattaagggatgatagaaacgatttggagaagataatgaaagactttctgattgccccatccattttatctgcaaattttgcgcggctgggtgaagatacagataaggtgctggcagcaggggctgacgttgttcactttgatgtgatggacaaccattatgtccctaacctgactatcgggccgatggtctgccaggctctaagagattatggtatcactgcaccaatcgatgttcatttgatggtaaaaccggttgaccgcattatccctgattttgccaaagcaggagcaacttacattaccttccacccagaaaccagtgagcatattgaccgcagtttacaactcatcaaagagcatggttgtaaagctggcttggtattcaatcctgcaacgcctctgagtcatctcgattatgtcctggataaactggatatcattctattgatgtcggtaaatcccggtttcggtggccaatctttcatccctggaacactagagaaactgcgtcaggttcgcaaaattattgatgaaagcggttatgatattcgtcttgaagtagacggtggcattaaagctagtaatattgccgcagcagcaaccgcaggagcagatatgtttgttgctggctcagctattttcagccagcctgattacaaaactgttattgataatatgcgtagtgaattgtcaaaggtatctcatggcaagtaaggtattaaaaggtattcgtgctatcgcttttgatctggacggcacactggtagacagcgccggtggtttggctgatgcactggatcaagcgctgttagccaaaggtctccctgctgcgggaaaagaacgagttgcagcttgggtcggtaatggcgcagacattatggtcgaacgtgcgttgacatgggctagaaccaaattgactgcgcaactgcataaagaaacccgtgagctgttcgaccgtttctatgaaacaaccgtaacaacaggcagccaactgttcccggaagtcaaagttacattggctgaactggcaaaacacaacttgccaatgggtatcatcaccaataaaccaacacctttcattgctcctctgttagcttctttagacatcagtgaatatttttcattagtgttaggtggtgatgatgttaaagagaaaaagccacatccggcacctatttatttaacaatgggcacattcggactgcgtaaggaagaactgctctttgtcggtgattcccgtaatgatattttagcagcacaagcggctggttgcccttgtgttggtttaacttatggatataactacggtgaatctattgcattaagcaatccagattgcatattaacgaatttttcggatctactatccacaattggcctcccatctttaaaacttcaggaagcataataaaatgaatgaacccactgtatctgaaacactaaactcccaaaaacctattgtattcagcggcgcacaaccttccggtgaattaaccatcggtaactacatgggggcgttacgtcagtgggttaaaatgcaggatgattatgactgcatctattgcattgttgaccaacatgcaattacagtgcgccaggacccaaaagagttgagaaaacgcactctggatacactggcgctctacctggcttgtggcattgacccagagaaaagtaccatttttgtccaatctcatgtcccacaacacgctcagttaagctggattctaaactgttatacctatttcggtgaactcagccgcatgactcagtttaaagacaaatcagctcgtcatgccgaaaacatcaatgcaggcttgtttgactatccggtactgatgacggcggatattttggtataccaaacaaatcaggttcctgtaggcatcgatcagaaacaacaccttgaattgagccgtgatattgctcaacgatttaatgccatctacggcaatatctttgctgtaccagagccgtttatcccaaccggtggtgcccgtgttatggctcttcaagacccagaaaagaaaatgtccaagtcagatgataaccgcaacaacgttatcgctctgttggaagatccaaaatcagcggctaaaaagataaaacgcgcggtcacagattcagaagaacctcctcgtgttcgctacgatctggaacaaaagccgggggtttccaacttattagatctcctcgcgggtgttactggcaaaaccattcccgaactggaagcagaatttgaaggccagatgtatggtcatctaaaaagtgctgttgctgatgccgtttccggtatgttgactgagctacaagagcgtttccactatttccgtaatgatgaaatcctgctgaacaaaatcatggcagaaggtgcagcgaaggcaaaagcccgtgcccaaattacgctagataaagtgtatgaagctgttggctttattgctcacccttaattaaaagataaaatgtgcacgtttactacgtgcacatttcagactacagaaaaatccatttaaaaaacgaggcgtatttttacatcatcgatgataaaaagcctggtagcttaatcagacagaaaagcaatacgattgggcagattaaaaccgtgtaaagcaagcttaagctgacctatttaaggtattcatatttttcatattcgattatttaactggtttattaaaaaatttattctgcggttgaaaatattattaaagcggtttattttccattaatagttttatgatgggcagattttaaaccatgattaaaggccgttgttttaccttctagttttaatcggtataaggttttgaccgttgtttttaccacttttaacacctgctttttatgaggtttaatcggaagttttttggcatcctgatacaaatgtactatgacgaccacaacccaccccgctttcacgcctactacgatgaacatatagaaaacatcctaaaataagcctgtttcttgtacagaccgatatctgattcacaaaaataagtcattaaaaatcagtcaactataaaaaaatcattttttttctcatattaactgtaagaaattaatgtgtggtgcgactaatcgagtgaagcaaatgcttgtttcagcaaagcagtaattcaccttctacacaaatataaaaggaatgttctatgactaagcaaacgacaaaagcattactggccctggctttaggcagcgtatttattacggcaagcacttcagcaatggcggattccggcagcaaaatggagaaatgctatggcgtttctctgaaagggaaaaacgactgtaaagcaggtgcaggcaccacctgtgctggtacctcaaaaaaggattatcagggtaatgcctggaaaatggtaccggcgggttcctgcgtaaaaatgaagtctccgacctccccgactggttttggtcaactggacgcatttaaagaagtgtaattccgacattaaacaggagctcatacgatgacagtttctttgccctcacatagcgtctctcgtgatgctcctgaccgcctcatgctaaataggcttccagccagagcagggatcgggttaaagccggagcattttcgcgctattctgcacaataaacccgacattggtttttttgaaattcacgcggaaaattatctggttgcgggtggtccatttcatcaggcactgaccaccattcgccaagattatccgctctctattcatggtgtgggcctgtccatcggaggagaaaatcctctgaatcagacccatttacagcgggttgctgcgctggttgaacgctaccagccggccgttttttctgaacaccttgcctggtcgactcacaacgatctatttctcaatgatctgctgccactgccttataccgacgtcacgctgacgcgggtctgcgaacacatcgatcaagtacagaatgcgctgcgtcgtcccattctgctggaaaacccatccacctacattgagttcagtgcctcaaccatgagcgagactgactttatctccgaggtggtacgccgcaccggatgtgggctactgctggacgtgaacaatctctacatcagtggcgtcaaccataatcgctgcccaaggcagatgttattagagctgccacttcaccgtgtcggtgaaattcatctggcaggttatacggaaagccgcgatggggcaaacgacctgctgctgattgattcacacgacagtcatgtgaccggacctgtctgggatctctataacaaaaccctgcggaaaacagggccgatcgccaccctgatcgaatgggacagcaatattccaccattagacgtgctgctgaacgaagccagccatgcccagcattacattacggagagcaagaaacatgcaacaacaactgtatcaagcacttcttgatcccgacctcatggtaccagaggggctgacaacctggaacggtagcgatccggcggtacgttttgcggtttatcgtaataatgtcatagcatcgctaatcgatgcactggccgaaaactgccccgtccttctcgctcagctcggagagtgcttttttcgtgcgatggcagcggagtttatacgtcaacaaccgcctccctctcctgttttggcaggctatggcgcacaattgccggactggattgcgacatttcagccgttggcagactggccttggctgagcgatctcacccggctggaaatgttgtttatcgaatcactgcacgcggcggaccctgccgaacagacggcagaagcggcccccattgacgatcccgcacagttgctgatggcgctccatccttcggtacggctcttcagttcagattatgccgtcttcagcctgtgggcctcacaccaacaaagtgaaaacgagatgatgctggacccattccagccggaacatatgctactgtgccgcgttgacgacgacgtacgaataatgttgctcagccgtgcggaaatgcagtttgttaccatgctccagtctggtcgatgtcttaccgaagccttagagatcgccgccggagaggatgcaacttttgaacctcagtcggttttacaacgcatgcaacactatggactgatcctttctctatatagcaacacggagcgctaagatggcattactcaaaacattagggtcaaaagggcaacatattgcgcaggaaaatgttcttccccttctggcacgcattagccttgccgcaacattttggctatcgggccaaagcaaagtggttggattaaacatagatattctggagacacgcacaccctggcaactagggattccgcgcgttaccgacagctccgtgtcgctctttaccaacgagtacaagcttcctctgctaccacctgatgttgctgctgtcatggccgcgaccgcagaacacttgtttccgctgctgctgattgtcggattagcaacacgcttctccgcgctagcattaatggtgatgacgctggtgattcagatatttgtttatccagatgcctggcctgtccatgctacctggctgacggctcagttgtatctgatgacttatggcggtgggaggttttcgcttgatcgcctgatttaccgccatcgtacctgattccccttccctacgttactttattttgattctcgttttcgccacgagcgaatgcggaagtcatagtgcgcaggtcggcaagctgttgtctgaagtttcggcacccgtcgcatattttcaaatgcagcattagctgaacatgttgagaaagcacgattttttcatccagcgcctgagacatcaggcgtgtagcttggtaacaactaagcatatttatcctcatgggaaaaccagcgttgtgacaaacattcacgtaaacgcatacgcgcacgccagagcatcacattcagattgctgacagagagcgccatctcctgacagatctcctgagtctcaagaccaataaattcgcgcatcataaatgcccgcgcgttttgcgttggcaactgtgtcagacaaagctcgaaaatcgtccaaaattgctcctgctcggccacttcatccggtaaatgccagcactgcggatgctcgtttcgcggccaatgaccagactcatcaaacagcgcttcgaaattttgctcatcaacatcatcagtcagttgcacgctgctgtgccgataacgcatacgcaaggcgtccgagattttgttgcgcaggatcgtaaacacccagcttttccaggcggctcgtccggcaaaagaagaggcattcttcatcgccccttccagcgcctcttgaacaacatcttccgcctgatgaaaatcattcaactgcaagatggcaaactgcaacatctgtttatgcagcatggaaaaaaactgcggatcccgcagcagattattgatatcggacattgtggcttctatcttaacaggattattcgggataaccggatattacgaaacaccattttggcggaatcgcttaaattcactcacatgacttagggaccgtttgggaaacggggacaattctaaattaaatctgttttttgtacagcaggggaagtgtctttccccagagcagcttatttttcgttcacctccatcagatcatggaggaaagtatcagtagttcagtaactgctagctagcgaactaagtttaaccgtctgttggatcgcacggaggctggaaacattcttgtcgttgcccaactaatagattaagacgaaatgcaatggatatcagaaaaacagtgtcagcgctaatgtgcacgttcaccacgtgcacattttattatttcccgaacaacctacggttaaaatcctcaatctttccaaacatcacccgcttttgcatagtcaggctccaactggcagataacccagcggcactcatcaaccgacgatattgctcttcgtcaaatggcatattaaaagcaattgctatcgcttccctaacgaaaacatcactattacgggaaacaagaacaagaggttcatctgggctgacatttcccgctgcaataattctataaagccagccacaacggccactctcctgcataatggcagaaaaattgctgataccagaatgacaattaagtttgtaacaaggcgaacgaggctgagttacttgaatcattgcctctccccaactgaaaatatcaccaatacaaatattttcttcagtcaacccagttgtggaaatattttcaccaaacgctggagcaataaaaaaatcttcttgatcaggaaattgatgtttccagaaatcatagtgttcacgaggataatgacaaagtgcacgatcagggccgccgtggaaatgggtttcggcctgctcatcaccgtctaatcctagagaagtcagacgcaggccaccatcaaccatccgtttgttaattgcgctggcagaaagttttcctgatatttcaattttacccgtatatacctgcggacaatacataattcactttccttattgaaatcagtctgacatcaccatcataaaccaacattcaaccaataaaaatgccggcagtcatatcagccggcatagcagaaaagagaaattattcagcaagttatttcactttttcctgataacgcttcgctgcttcatcccagttaacaacgctccagaacgctttaatatagtcaggacgacggttttggtactgtaagtaataagcgtgttcccaaacatccagaccagtaatcggataaccagatgcaccagaaatcgcttcacccattaatgggctatcctggttagcagtcgatacaactgccagtttgccatcatctttcagtactagccacgcccagccagaaccaaaacgggtagccgctgcctgctcaaatttctctttaaaagaatctatgctaccgaaatcgcgctcaatagcttcttttaatgggccttgcagagttgtgcctaatttcagacctttccaaaacaagctatggttagcgtgcccaccagcattattacgaacaaaagtacgtttatcagcaggtatcttatctaattgctgaatcagatcatcaatacccagtcctgccagctcagggaaggcttctagggcgctattggtattattaacgtaagtctgatgatgcttggtatggtggatttccatcgtctgcttatcaaaatgaggttccagagcttcataagaataaggaagagaaggtaatgaatagctcatatcatgtactccagtcatataagaatggttcaaagtccacaccttgtgaacaacgtgatcattatagttaattaaatattattggaaatgcttatcaataccatattcttattatggttttatcatacaactgtgtttcagtaacttatcagtcaatttgtctatattaaacattattattggattaggattttgaattactatttttgattagcaattaaacctaaataaacctgcaacactaaatgacaatcacgtgaaaaatattctttttattgcgtgatcttccgcgcaaaaaaaaaacaaaaattctctttacactttagttaactttgatttgacataatattaacattcgtaaggagaatattacatgaccaaaataatgaagcaccctattcctatcgccattgcagaacatgccctgatgaatgagcaacaatatcagcaagactaccaattatcgttgcaagatcccgacaggttctggggtgaaaaaggaaaaattgttgactggattaagccttacaccaaggtaaagaatacctcttttgatcctggacatatcaatatccgctggtttgaagatggaacactaaacttaagcgcaaattgtctcgatcgtcatctaaaagaacgtggtgagcaaaccgctattatctgggaaggtgatgatccaacagaatccaaagcaataacctatcgtgaactacaccatgatgtatgtcagtttgccaatgtattgaaaaatatgggtattaaaaaaggcgatgttgttgctatttacatgccgatggtgccagaagcagcggttgccatgttagcatgtgcccgcattggtgctattcactctgttattttcgcaggtttttctcctgatgctgtatccgggcgtatcatcgattcaaacaccaaattggtcattaccgccgatgaaggattaagagccggacgtacaatccccctgaaaaagaatgttgatgacgcattaaataatgcagccgttgtcaatgtatccaatgtaatcgtttttaaacgtactggaaatattggtcactggcaatctggccgtgacctttggtggcatgaattggtcgcagacgcgagtgctgactgtccagttgaagagataaatgcagaagacccgctgtttattctctatacctcaggctctaccggtaaacccaaaggggtactgcacaccactggaggttaccttgtatatgcatctctaacatttaaatacgtattcgattatcagccgggggaagtctattggtgcacagccgatgtgggatgggttaccggacatagctacctgctctacggccccctttcctgtggtgctattaccctaatgtttgaaggcgtaccaaactatcctgcggttaaccgcctaagtcagattattgataaacatcaggtaaatatcctatatacagcacccacagcgattcgtgccctaatggcggaaggtgataaagctattgaaggaacaaaacgtacttccctgcgtattatgggatcagttggcgaaccgattaatccggaagcttgggaatggtattaccagaaaattggtaacagcaaatgcccgattgtcgatacctggtggcaaacagaaactggtggcttcatgatcacaccactaccaggcgcaaccgaactaaaagcaggttccgcaacgctacctttcttcggtgttcagcccgcattggttgataatcttggtgaacaactagaaggtgtttgtgaaggaaacctagttattaccgattcctggccaggacaagcacgctcactatttggcgatcatgaccgtttcgaacaaacctatttctctacctttaagggaatgtattttagtggtgatggcgcacgccgtgatgaagatggctactattggataactggtcgtgttgatgatgtgctgaatatttccggccaccgtctaggtactgctgaaattgaatcagctttggtctcccatcctaaaattgcagaagctgctgtcgtaggtaccccacataatattaaagggcaggcaatttatgcctatgtcaccttaaatcacggtgaagaaccctctccagaactctatacagaagtccgtaattgggtacgtaaagaaatcggcccgattgctacaccagatatcctacactggacagactccttaccaaaaacccgttcaggaaaaattatgcgtcgtatcctgcgcaaaatagcctccggcgataccaacaatctaggggacatttcaacactagcagatccaggagtagtagaaaaattgttagaagaaaaacaaacaatgagtatttcgtgacaaatcatgccgccgtaaggcggctgtaatcaaaatataataaatataatgaggatatactccgatgaatgatgacatttaccaagggatcgagaataacccgcgtttcaaagaattggttgaaaagcgaggacgttttgcatggttgctatcaataatcacattaattctgtatgtcagttttatttttctcattgcatttgcacctgaatggctaggcactcccctttataatggttccaatattacccgcggaataccggttggtattggtttaattgttatttcattcatcttaaccggcctatatgtcatcagagccaatagcgagtttgatcaccttacctcacaaattctcagtgaggtaacgaaatgaaaaatttcctgttattagcaataatgttatttcctcatcttacttgggctaacgtaatctctgaaactggagaaaggcaacctgtcaacattcaggctattatcatgtttgtcctgtttgttggtttcacactctatatcacttactgggcctcaaaaaaaacacgctcccggactgattactacacggcggggggacgtattacgggtttccaaaatggaatggcaattgcgggagattttatgtccgcagcatcattcctcggcatttccgctttagtctatacgtctggttatgatggactaatttattctatcggcttcttgattggctggcctattatcctatttctgattgctgaaagattaagaaaccttgggcgctatacttttgccgatgtcgcgtcttatcggttacagcaacgcccaatccgtatattatctgcaattggctcgctgtttgttgtcgccctttatcttattgctcagatggttggtgcaggtaaacttatcgaattgctttttgggcttaattaccatgtagcggtcgtattggttggtatcctaatggtactttatgttctgtttggcggtatgctagcaacgacttgggtacaaattatcaaagctatcctattactagctggtgccacctttatggcccttatggtcatgaaaatagtaaacttcaatttcaatacgttgttcaaagaagccattgcagtccactcaagaggtgaagccatcatgagtccaagagggttggtatctgacccataatccgcactttctcttggtctggcattgatgtttggtactgctggtttacctcatattatcatgcgtttctttactgtaagtgatgcgaaagaagcccgaaagagcgttttctacgctactggctttattggttatttttacattctgacttttatcatcggcttcggtgctattttactggttagtccaaacccttcctttaaagatactaccggcgcactcattggtggtactaacatggcagccgttcacctcgctagcgcagttggaggcaacctgtttctgggttttatctctgctgtcgcctttgccacaattctagccgttgttgcggggctaacgctggctggcgcatcagcagtatcacatgacctatatgcaaacgccattaaaagcggtaaagccaatgaacgagatgaactgagagtttcaaaaataacagttgtgatacttgggtttatcgcaatcggattaggtattctatttgagaaccagaatatagctttcatggttggattagcattttctattgctgcaagctgtaacttcccaatcattcttttgtctatgtactggcataaactcactacccgtggtgcgttagtcggaggttggctaggattaattacagctgtcgttttaatgattctcggtccaacaatttgggtcagcattctcggtcacgagaaaccaatctatccttatgaatatccagcattattctcaatgattatcgcttttattggttcatggctattttctatcaccgataattcacaacaaggtatgcaggaaagagaacaatttagaatccaatttattcgatcacaaacaggacttggtatcgcacaaggaaaaacacattaattacgtttgtatggccaacctctccttcgggagaggtattttcattaaaagccatctgaattcagagctatttcacaaattaacctcttgttttaatcccaggttaatgattaactcttttatttcaatttatacccgttatccttcaagttgcctctttgttggctgcgctcactcaccccggtcacatagttatctatgctcttggggattcgctcccttgccgtcgcgatccatcttgaaatccattgggtatattaattaagttattaatctgtatgcgaaataaatggccgattattatttttttgactctctctttactaccgataatcttcattagtgatttaaaaggtgagtataagttaaaaataatattactgagtttcttactagcaaatgttaacgcatttttttattgttataaatatcttaagccattggttttacttatttctatattgtggtcgcttaatatatccacatcattttttttctttaatgaacatcagataaatttttcttcaactattgccaacacttttatcaatacaaatagcaatgaagctgtaggtatgttgtcctacaataaatactatgtatttttctttattttcatgctgttaatatattttttgtctattagatggctctcaaataatatagacaaaagattactaaaattcagtttatgggtttttatttttttctgcctattagggcctattgactactatatctcagaaaaaaatattcagatgatattattttatcagaacactttttaatgggaacaccattctataactcatcagcaatggtaaaagcaatatatgataatcaacaaattaaaaatatttcttctgttaaagtgaattttaattatataaaagaagataaagatattgatatctacatattactgataggagaatcagcaagaagagatcatatgtctctgtacggttatgagaaaaccacaacaccaacattagacacgatgcagaaaaatatgctgatattcaatcaagctatttctccagctccagttactatattatccgtacctatttcactttctaatattactttataccagctcagaaataaggctcattatgctgacaatgttatatctttagctaaagatgcagggtttaagacaacttggataagtaaccaaggaagatcaggtaaaaacaatagtctgatcacaattattgctaatatggctgaaagccaaaaatggaatgaatatattggatatgatgaagagttactaacctatttagatgattcattaaaacagaaaggtaagaaatttattattatgcatatctatggcagtcatgagccatcctgtaaccgatttcccgaaaataaactaatatctttttcatcgaacgaagatgataattgctatgacagctcaatagtttatacagatcagctaatagagaaagttattaataaaatcaaagattataaagcatctattctctatttttcagatcatggattacaacgtttagataaaaatggtgacatccgttatcaccacggagttagtcatcctcgaaaagaggcttataatgtccccttatttatctggtataacgataatgttaatccaagatatcatcatactggtgtaataaatacccctttctcaacttcagataattattaccttatcagtgattggctaggtatttatcataaatctccagaatactgccgttcaccattaagcaattgtttcaaatcagagaaagatctaatggtgatcgatggtaataaaaacttaataaaatataatgatcttcttggtgaaaaatatatcaaaaattcaaacaagtgattcccagatgtttaagtctattatccttggcatcaactcaaataaatgattcatatacatgaaagaaggataaccacaatctgtaatttctcaaatttttaatacaataataagccataatgatgaattaaatttggaatttcactactgactttatataagcttaaaaaataggtttgagttatttttcgtatcagctacttatagcgggttttaattattaacggatagataagagctggctaattttcttaaaagaacctgattatcacttaaattcagctcccataggcgtatacttaaaataagtctgtgtggaggtaaatgaaaatggctaaaaatcagattcaattccaaaaaggcatttctattcatgaggttatttcattatatggtcatgaagaacaatgccagaaacaggtgttcgatatgcgctggcctacggggtatcactgccctcattgtgggcatgataagtattgccagttaaaatctcgtctcctttatcagtgcaatcaatgccatcatcagacatctttgacggccggcacattgttttctgcgtcaaaattacctttaactgtgtggtttttggcgatttatctcatgactcaggagaaaaatgggatttctgcacttgaattgtcacgtcaactgggcatttcctacaacgcggcatggcgtatgaaacacaagctaatgaaagcaatgaaagaacgggatgacgaaaagcctctcggcgggtttattcagcttgacgacgcatactggggaggggctcagcatggccccgagggcgaggggcaaaagggaaatgccctttcgttgcggaggtttcaatgaatgaaaagggccaccctatgttcatgcgtttcagcgttgtgaaagggtttaagaccgaggaacttacccgttgggctaaagtgtatcttaaaccaaaatcccttgttatttcaaatggattagcttgctttcgggggattaagcaagccgggactttccatttgccccgcgtcaccggcggtggagcgcagagtgttaagcttccttattttcagtgggttaacacaatgataagtaatgtaaaaaattcgatacgcggaacatatcattcgattagcaaaaagtatttacctcgttatcttgccgaattctgtttcaagttcaattggcgctttaaccttaaaaaaacattcgaacagcttatttattcatgtatccgggcagcacctatacctgagtatttactcaagctagctgagattcgatggtaatcaggtaaaagaatgctcaccagatggaaatccaaaataactaaacagccttctgcatccatatgggctctaaaaatggttctcaccttcctaccccttgtatgcaaccgccttcaaactctacctctcaatgagccgtagccgtaacagaagcgattacacatgaagtgtgcctaaatgatttggcagtatcagacccctgaccagaaaacatgcctagatgaacgtaatgttccggtgaactcaccttgcgtggtcagataaccacaaaatgggatgttaacggaagggattctcaggccagggcaacagctcattcaaccgattgttcggccagacaggcagccggctgaggacatcacgtaaccagacccagggctcatgtccgttggctttggccgtttccagcaggctcattatcatggccgcccgttgccccgcggccagtgaacccgcaaaaagccagttctttcggccgagcgccacaccccggaccgcattctccgcccggttgttgtctatcggcaccccccgtcatccagataacacaccagcgccgaccagcgcttcagcgtgtaatctatcgctttgcgtaaccccgagttgggggccgtttgggtctgcatcgtttgcaaccaggaccggaactcattcagccacggccgggcataacgctgccgccactgacgccgtttatccggcggctggtgtttgatttttcgctccagcttgtacaggtcacgaatgccatccagcgcctgtttcgccaccggactttggctcgctttgtattggtcaaagaatttgcggcgggcgtgagcccagcaacccgcttcggtgatatccgcccgggcatgcagtgcgttgtaaccggcatagtcatccgtcaccaacgtgccgcccgaccagtctttcagcaggctctgggcataacggccgctgcggccgggatgcagctcatagtataccactgccggcgaggtatcggggccggtgacagacgtccacaggtaagctcgctgggtctggccttttcccggggccagtatcggcaacggggtctcatcggcatgcagcaccggggacgtcagcagcgtctgcttcagggcatcggctaacggttgcaacgccaccgccacctgccccacccagtccgacagggtgctgcgggccagggtgacaccgctgcgggcatagatttgctgctgacggtagagcggcaggtggtcacgatatttagcgaccaccacctgagccagcaaccccggctctggaaggcccttttcaataagatgggcgggctgggctttagcatgcacacactgacagcgcgcgcagctgtactgcgggctgatatagcgccggacgataaacgtggccggacggtattccagtcgctcactgatttcatcacgcaaaaagcgcagggcatgaccgcaatccgggcagctctccgtctccggcgccagccggatatcttcacggggtaaagtcgccggcaaaggctgacgtttaggctgggccggggtcgcgttttccttgatatgcaggcgtgacagccgggtttccagcaccgcgatatcggtatcggcatcttcctcaaactgactgcgtttgggaccggcaggcagggtttcgctgtgcgcgccaaaacgccagcgttgcgcctgtttcagggcctcttccagctggcgaatataatcaccttgttgctgaagcagcgccagtgcccgcaggcggaactggccggggtcatccagcgcgattaagtcattgagcgtcatgccgacagtgtaccggataattccccgtcgttatccggtaaaagtgtgaccggggtagcggaattagtttcgccagccggacaggtcatctccctcgacctgttgccagtgaatgccgcggatgagccagtcaaactgggcgggcgtcatcacccagctgcgctcgccctgcttcggccagacaaaatgggcccggtgcagacggcgggtacacagccagacgccgtgtcggtcccagcgcaacaccttgagacgggagcgggccttgttgcagaaaataaaagcggcttcgtcctgccagcgcaaattcagcccctccaggtgctgggtcagggcatcaatgccccggcgcatgtcgacgggctctcgcaccagaaagagctgttgcggtttcagcatcgggtcagtacccgcatcacgtcaggcaacagcgtcaatggacaggcgatggcatagccgtctggggtatgcagggtgacggtgcgcgcgtcgtcaggctggagtgaaaccggtaagagggcgggcagtgtctggctgagaggttgggggatgttgttactgtcggcaatccagtcgcggaaagcggaaaaactcagctgatgctgttcgcaatactgttttcgggtcaggtcactgtggcgccattgggtcacatggtgttgtttttgttccggggtatatcggctacggctcatggtgtcagtctccaggtgaagataaggaagcggtagcgtgcatgggccggagaggaagaacaaggtgagatgaccggacgtttacagatgaactatgcacgctatatctgtatctggctcataaatgcaaaaacccccagctttcgctgagggtttctacggtatttgaagcctagcagtgtcctactctcacatggggagaccccacactaccatcggcgctacggcgtttcactgctgagttcggcatggggtcaggtgggaccaccgcgctatcgccgccaggcatattcggttttcttccggccgttgtcgctcttctgccacaaccacccgaatcaatctctgaacaagctgaaaagtcatctctctgctgtcaaccggcttctgccggctgccctctgaacaccaaaacaccttcggtgttgtaaggttaagcctctcggttcattagtactggtcagctcaatgcatcgctgcacttacacacccagcctatccacgtcttcgtcttaaacgttccttccgtgacctcagtcaggggaagactcatctcaaggcaagtttcccgcttagatgctttcagcggttatctctcccgcacttagctaccgggctatgccattggcatgacaacccgtacaccagcggtgcgtccactccggtcctctcgtactaggagcagcccctttcaatcttcctgcgcccacggcagatagggaccgaactgtctcacgacgttctaaacccagctcgcgtaccactttaaatggcgaacagccatacccttgggacctacttcagccccaggatgtgatgagccgacatcgaggtgccaaacaccgccgtcgatatgaactcttgggcggtatcagcctgttatccccggagtaccttttatccgttgagcgatggcccttccattcagaaccaccggatcactaagacctactttcgtacctgctcgaaccgtcactctcgcagttaagctggcttatgcctttgcactaacctcacgatgtccgaccgtgattagccaaccttcgtactcctccgttaccctttgggaggagaccgccccagtcaaactacccgccagacactgtccccggcccggtttacgggcccaggtgagaacatcgaacattcaagggtggtatttcaaggatggctccacgcagactggcgtccgcacttctcagcctcccacctatcctacacatcaaggctccatgttcagtgtcaagctatagtaaaggttcacggggtctttccgtcttgccgcggggacactgcatcttcacagcgagttcaatttcactgagtctcgggtggagacagcctggccatcattacgccattcgtgcaggtcggaacttacccgacaaggaatttcgctaccttaggaccgttatagttacggccgccgtttactggggcttctgtcaagagcctcgccttgcggctaaccccatcaattaaccttccagcaccgggcaggcgtcacaccgtatacgtccacttacgtgtttgcacagtgctgtgtttttaataaacagttgcagccagctggtctctgcgactggcttcagctccggaggcaaaccccttcacctaccgccagcgtgccttctcccgaagttacggcaccattttgcctagttccttcacccgagttctctcaagcgcctgagtattctctacctgaccacctgtgtcggtttggggtacgattcaatatgacctgaggcttagaggcttttcctggaagccgggcatcaaccacttcaccgccgtaacggctcgtcatcacgcctcagtgttcacagaagagcggatttacctgctcctcccacctacacgcttaaaccgggacaaccgtcgcccggatggcctagccttctccgtccccccttcgcagtcacattcagtacaggaatattaacctgtttcccatcagctacgcctctcggcctcaccttaggggtcgactcaccctgccccgattaacgttggacaggaacccttggtcttccggcgagcgggtttttcacccgctttatcgttacttatgtcagcattcgcacttctgatacctccagcaggcctcacagcgccaccttctccggcttacagaacgctcccctacccaataacacttgcgtgtcactgccgcagcttcggtgcatggtttagccccgttacatcttccgcgcaggccgactcgaccagtgagctattacgctttctttcaatgatggctgcttctaagccaacatcctggctgtctgggccttcccacatcgtttcccacttaaccatgacttcgggaccttagctggcggtctgggttgtttccctcttcacgacggacgttagcacccgccgtgtgtctcccgtgataccattcttcggtattcgcagtttgcatcgggttggtaagccgggatggccccctagccgaaacagtgctctacccccgaagatgaattcacgaggcgctacctaaatagctttcggggagaaccagctatctcccggtttgattggcctttcacccccagccacaggtcatccgctaatttttcaacattagtcggttcggtcctccagttagtgttacccaaccttcaacctgcccatggctagctcaccgggtttcgggtctataccctgcaactctttcgcccagttaagactcggtttccctgcggctcccctatccggttaaccttgctacagaatataagtcgctgacccattatacaaaaggtacgcagtcaccctgattaatcacggctcccactgcttgtacgtacacggtttcaggttctctttcactcccctcgccggggttcttttcgcctttccctcacggtactggttcactatcggtcagtcaggagtatttagccttggaggatggtccccccaccttcagacaggatttctcgtgtcccgccttactcatcgaactcacagccataccatcttcgagtacggggctgtcaccctctctcgccggcctttccagaccgttcctctgatgctatcgctgatgcaggttctgggctcctccccgttcgctcgccgctactgggggaatctcggttgatttcttttcctcggggtactgagatgtttcagttcccccggttcgcctcattaacctatgaattcagttaatgatagtgcaacgcattgcactgggtttccccattcggacatcgccggctctgtcgcttcatatcagctcaccgacgcttttcgcagattagcacgtccttcatcgcctctgactgcctaggcatccaccgtgtacgcttagtcgcttaacctcacaacccgaaactgtctcggactgttcagcttgagagacacctcaacaatacctcggcgatattattgagtatttcaatttttcagcttgttccagattgttaaagagcatctatcgctaaacagattcacctaaatccgcttaaagataacctgacaacgcctttcacccgtcatcccgcaatatggcgtcccctaggggattcgaacccctgttaccgccgtgaaagggcggtgtcctaggcctctagacgaaggggacccgcaggtcagcttcgcagactcatttgcactctattttcatcagacaatctgtgtgagcactgcactcaacctctctcaggtaaggaggtgatccaaccgcaggttcccctacggttaccttgttacgacttcaccccagtcatgagccacaaagtggtcagcgcccccctttcggttaagctaccgacttcttttgcaacccactcccatggtgtgacgggcggtgtgtacaaggcccgggaacgtattcaccgtagcatgctgatctacgattactagcgattccgacttcatggagtcgagttgcagactccaatccggactacgacagactttgtgtgttccgcttgctctcgcgaggtcgcttcactttgtatccgccattgtagcacgtgtgtagccctactcgtaagggccatgatgacttgacgtcatccccaccttcctccggtttatcaccggcagtctcctttgagttcccaccttcacgtgctggcaacaaaggataagggttgcgctcgttgcgggacttaacccaacatttcacaacacgagctgacgacagccatgcagcacctgtctctcagttccctaaggcacttcgctgtctccagcaaattctgaggatgtcaagagtaggtaaggttcttcgcgttgcatcgaattaaaccacatgctccaccgcttgtgcgggcccccgtcaattcatttgagttttaaccttgcggccgtactccccaggcggtcgatttaacgcgttagcttcggaagccaccgttcaagaccgcaacctccaaatcgacatcgtttacagcgtggactaccagggtatctaatcctgtttgctccccacgctttcgcacctgagcgtcagtcttcgtccagggggccgccttcgccaccggtattcctccacatctctacgcatttcaccgctacacatggaattctacccccctctacgagactccagtcaaccagtcttagatgccattcccaggttgagcccggggatttcacatctaacttaattgaccgcctgcgtgcgctttacgcccagtcattccgattaacgcttgcaccctccgtattaccgcggctgctggcacggagttagccggtgcttcttctgcgggtaacgtcaaaatctaaccctcttcaggctaaacccttcctccccgctgaaagtactttacaacccgaaggccttcttcatacacgcggcatggctgcatcaggcttgcgcccattgtgcaatattccccactgctgcctcccgtaggagtctgggccgtgtctcagtcccagtgtggctggtcatcctctcagaccagctagagatcgtcgcctaggtaggccattaccctacctaccagctaatcccatctgggttcatccgacggcgtgaggccctttcaggtcccccactttggtctcgcgacattatgcggtattagccaccgtttccagtggttatcccccgccctcgggcagatccccagacattactcacccgtccgccgctcgtcagcaaaagcgcaagcgctttcctgttaccgcccgacttgcatgtgttaggcctgccgccagcgttcaatctgagccatgatcaaactcttcaatttaaatcaaagtttgatgctcaaagaattctgactaattatttcgtaatgaattaactgttgttcactcttcaagactttaaaacgtatttttttgtgatacggtcttgtgagtgcccacacagattgtctgattaattgttaaagagcaggctgacataaaaaataacattctcgttcagccgggctgcgtatactacgctgttcacccgcagagtcaagcactgattatcgctttctctgcccgacctcacaatgtttatcagcgttgtgtcggtcagtggtggcgcattatagggcgttctttgacgctggcaagcatttattaaaaaaaaactgccgttcgcagtttttttcaacaaaatccgcgatttcgtgtttttttcatacaaaattgatggcatcgacaataattattcccaaactaaagtactattccacgtattggtactcgaatcatgccaacgattcattggaatttccttgatcaggatttattaaagtggtggatgaatcgtgacaatcttagtcaagtggtcgaacatttccatatagtaagattagtaatagaaccacaagtttgctttcttgctgcacaaaatgccacacaaaagcaaaagaagcagctcttacagataatagatgaaatgtatctactaaaaaccgggaaaaatggataggatcgattaccagtttcactacaccatttataaatcttgtggaaatccattcttatgctcttttgccaacctgtttaacctagtttaccagaactgctttgaagctattattttcgataaagttgtaccactgaaagctcataaaacaattgttaattctattacccaaggtgacagttacagtgcacttctcgcttgccgaaagttattaacagaacgcgaatgatcttatatagtagtgcattagattaatatccaaccaaacattgtctagataaaataagcaggactattaatggtaaaaaccgctcgtaatatggcggggctaccctggattgctgcaatagctttctttatgcaagctttagatgcaacaattctcaacacagcattgcccgctattgctgaaagcctcaaacattcacctctggcgatgcaatctgctgttgtcagctatactctgactgtcgctttgctaattccagtcagtggctggttagcagatcgtttcggtacccgccggatatttatgtttgctgtatccttattttctttaggctcccttgcctgtgctttgtcaggtaatttagcttttctagtggtttcacgtgtaattcaaggaattggtggcgcaatgatgatgccagttgcccgtcttgctttattacgtgcatacccacgcagcgaacttctacctgttatgaattttgtcaccataccagggttagtaggaccaattcttggtcccatgctcggcgggctattagtcacttatgctacctggcactggatatttattatcaatattccaatcggtttattggggattatttacgctaaaaagcatatgcctaattttacaatgccaaaacgttcatttgactttttcggtttcatactttttgggctgagtttaatcatggtttctgtcagtttggatttactaggagagagttcgttacccggctatatacctctgacaattatggttggtggttttatgatattatttggttatctgatgcatgctagaaaacaaccccaaccccttatcagcctggaattattccgtattcgcacattctctatcggtattataggtaatattgttacacgcttgggaacgggttgcattcccttcctgatgcctttgatgctacaagttggatttggttattcagcggtcattgccggaatgatgatggcaccaacagctattggttctgttatagccaaatctttcgttactaatgtattaactggctttggatatcgtaaaacgctggttagcataaccattattattggattaatgatttctcaattttcactgcaatcaccagaaatgtctgctgttcttttgtctattccactattcttactaggcatggctgtatctattcaatttacttcgatgaataccattactctcgctgatctgaccgataataatgccagttcaggaaatagtttattagctgtaactcagcagttatctattagcttcggtgttgcggtaagtgcagctattcttcgtttctatgaatctatgcctaatggaacaacagttgataacttccacagtacttttattaccgtaggaataatcactttactctcttcttccaccttcctactattacataaggaagatggagataacatgatcaagaaaaagaacacttaagaacgagaaactgaactacgctcaatcagtgtcggagtcaatactaataatttaggatcactttctgggttatccatccgataaagcaaagtatcaacagctaactttcctaactcatcttttggctgatgaatggttgtcaatggtgggatcatataaggggcaaggtcgatatcatcataacctatgatggaaatatcatccggtacagaaagtccggcttggtacagagcctgataagcgccaacggccattgcatcatttcctgcaaaaacagcttctggcggttctggatgttgtagtaattcctgcattgatttaaaaccaccagcaaattcaaaatcactgtaaatttcatatccgtcaggaatagtaaggccagcatttgccattgcctttctataccccttcaatcgatgattagcaggtgttttatcttgtggacctgcaatacaggctatttttttaaaaccacagctaataaggtgattagtggccatctcacctcccaacaaggagttgtcctgaataacatcaccgacaatatcaaatggagaccaatccatcataaccacaggtaaaggaggataacggcgcaaaacatcacaggaattgtgttgattttcagtacacataatcagcaccccatctactcgcttttgcagcaacgtttccatgctgtaatccattcgtttggtatcaccttctgtattacataagataaggctgtaaccacgctcataacagcttcgttcaacccctcttacaatttcagcataaaaaggattattactggtcgttaccaacataccaatggttttggtttgcttgattttaagacttcgtgcaagcgctgatggcgcataattcaattgctcaatcgcatcattaactttctttttcacaccatcactgacataacgattattattaataacatgagatacagttgatgtagaaacacctgcaaaacgagcaacatctttcattgtagccacagttaatcctgttcaattaaaaatgcatcaatttcatttcgccacggaacagaaggctgagctccctgacgggttaccgctatcgcagcagcagaatgagcaaatcgtatggcagataacatggattttctttccaataatgctgtcaccagcgcaccattgaaagtatctcctgccgcaacagtatctacaacgttaactttaaatcccggaacaatttttcctttctgaccactttcactcaaccataccccacggctacccaatgtgataattacagtttcaatacctttcccatgcagtatttgagccgcattttccgcatctgaatcattttctactttaatgccggtgagatattccgcttcagtttcattcggtgtaatgatatccaccaatgagagcaattgatcagataattttcgggccggcgccggattgagtattacttttgtattattttgtttagctattgttgcagcaagttgcactgtttccaatggagactcaagttgtatcaataatgcatctgcttcctcaataatattttggtagcgatagaaatattccggtgtcaacgctgcattagcgcctgcattgataccaataatgttttcaccttgatgattaacgaaaatcaacgctacacccgttgtttctcctttaatcacttcaatgccagaagtgttaatattatcctttgctaactgctgacagatacgaaaaccaatatcgtcctcaccaacacaagcaataaatgtaatgtcagcaccgctacggcctgctgctaccgcctgattagcacctttaccaccaaaagcaacctgatattgttctccgatcaccgtttcccccggtcgagggaatgacttaagattcaaaatatggtcagcattaatgctgccaagcaccgcaagttttgctgtactcattacatttattccttttcaattatgccgtcaccatcaccaataagtaacggcataaataccgatttattttttaataactaactccaattctacagggatgacggcctcaactttttcgcccctcagcactttatttgcagtctgaacaccaacgataccaatttgatcaggacgctgagcgattgtcgctcctagttttccacgttgaacagctttgataccatctccagtaccatcaaaaccaacaactaatacatcgcttttacctgctgtctgtaaagcgcgcaaagcacctaacgccatctcatcattctgagcaaatacagcttgtacagccggatgagccgtcagtaagttctgcataacgttcagtcccttggttcgatcgaaatcagcaggctgactagctagcacattaaatttatgttcctgtgctaccttattaaatccttcaccacgttcacgggcagcagaagtgccggcaataccttctagctgaataattttggcttcattccctaatttttcggcgataaaatcacccgctattttaccccccaagcggttatcagaagcaatatgactgacaacagtacctttattcgctatccgatctagagtaataaccggaattttggcattgttagccataataatagcattaccaacagcatcggagtcagtcgggttaattagcatgagtttagtaccacgtaccgtcaaatcctgaacattagctaattctttcgctggattatcctgagaatccaacacaattaggttatagcccaacttatccgcctctttttgagcactatctttcattgtgacaaagaatggattattcagggtagaaatgactaacgcgatagtgtctttcgccaatgcatttacacttacagtcatacttagcgcaacagcagataaaattgttactaatttcttcactttcatcgtgttatttcctgtagggtgaggttatttaccacttttgttatcaaccagaactgccaacaatattacaattgctttaacaatcatctgatagttagaagaaatacctaataagtttaagccattatttaaaaaaccgaggattagtgcaccaatcaaagtaccaataattaaccccttaccaccagccaggcgagttcctcccagaactacggcagcaatagcatctaattcataacctccccccgccataggttgagcagaagaaagacgagcaacttcaataatacttgccaatgccgtcaggaaaccgcataaggagtaaacgataattttaattttatcgatattgataccagataaacgggtagccgattcattcccccccaaggcataaatataacgacctaaacgggtgtgatgcaggatataccatgtgataacaaaaactatcaacatcagccatactggagtaggaattcccagtgggcgaccaataccaaaccagccaaacagatcggcattatcactgaatcctgtatttattggactaccatcagtatagacacgggttattccacgaagtaataacatcatgactagagtggcaataaaagcctgtactttacctttagcaattattattcctgtacaagcaccaattgcagcacctaaagccaaagcactcacgatagccaccagagcattaacttccgtaccaaccaatgaagctactattgcacctgttaacgcaagcaatgaaccaacagacaggtcaatacctgatgtcaggataaccaatgtcatcccaacggccataatggcattgactgatgtttgttgcagaatattaaacaagttatttaaagtgaaaaagttttggctaagagaagaaactactgctatcagcactagcaacgcaatcagtgacttttgtttcagtaaccactctttagtaaaccaacgtttaaatgtcggtgatatattagaattcatactgaattactcctgaatcgctccatattgtttgcctacagccgctgccatcaaaatttcttgagttgcctgttcagcaaaaaattctccactgatctggccttcacacataaccaaaatacgatcactcattcctatcacttctggcatttcagaagaaacgagaataatgcttaacccctctttcttgaattgattaattaactgataaatttctttttttgcaccaacatctacaccacgcgtaggttcatccagaataagaacttttggtctggtcattaatccacgggcaatagctactttttgctgattaccaccagaaagtaaaccaataacttgtcccattgaaggtgtcttgatactaaacaatttaataaagtcactaactgcattctgttcttctttatgattaagaccacctaaccggttactgaaataacgcaaggcagtaagagacatattatctttgattgacattcccaaaactaagccatcacgtttacgatcttctgaaatataaacaatcccacaagctaacccatcctgagggttacgaattacaatgggggttccatccagtgtgatttgcccctgagtttttggcaacgcaccataaataattttcatcaattcagtgcggccagcccccattagccctgatatacccaaaatttccccgctataaagggaaaaactggcatttgtcacaccggggccagaaatctgcttaacttcaagtcgttttttaccccgaggtaaattcaggcgaggatactgatcttccagttttcgcccaaccatcatttcaatcagagtctcttcttttagctcttttactgacttttcaccaataaattgtccatcacgaaataccgttacatcatcgcaaatttcaaaaatttctctcaaacgatgggagatataaacaatgccacatctctgagattttagttcatatattacgcgaaataatgattcagtttctgtatcagtcagcgcatccgtcggctcatccataatgataactttggatttaaaactcagcaccttagcaatttcaaccatttgttgatcaccgatagaaagttcagcgactaaacggtgactgctgtaactcagattcaatttttttaacaggcgatcggcttcctgatacatttttctccagtcaattgcaccgaatttattaacaaattcgcgtcccaggaaaatattttcagcaatagtcagttggggaataagatttaattcctgatggataatcccgatccccgcttcctgagaggatctagggccagaaaaaatcacttcttttcctaaataatgaactgtgcctgtatctctggtatatatcccagtcaacactttcatcatcgtggacttacctgcaccattctctcccaccagtgccatcactttacctggataaacacgtaatgccgcaccagataatgctttgacaccaggaaaagatttactaattccttttagttccagtacaggctgcataatcacctcagaaagtcacaccagcaccaaggataatattggcataaggagaatgctctcctgtgcgaatcactgctcggctatgttttgttttttctttcaacacattatgactaatataatctacagtaattgaattcccttgctgtttctcaagctctttaatttgagttaatattaattgatgtattaaaggattatggccaatgatctcctcagctaagaatgcagcttcaatctgcatttcttgtgtaacaacattaagaacggatataaaactgggaattccctgggttagcgctaaatcaatccgctgggctaaagaaggaattggtaatccagcatcaccaattgtaatctggtcagtatgccctagctgagaaattacggctgaaatttcagaattaagtaatacaccttttttcatttttttattccattagcgaaacgtttcgctatttagtaatatagaaagtaatatttaaaatgcaacattagtgatacaaaaatgtgatcactatcgaaacgtttcgataataaaagaaacgaaaaaaaacgttaacttattgaatatttgacgctgaatcgatttttaaggtaaatattgtctatatcaacaaataatgattaaaatctatggagaaggttaattaggttttatctaatccaacagataatattggtaagaatcatgttgttagcagaaaaaatagtttgcttaagtcattatctggaaagtggtctgtatgaaagacaacagactattcgtttatgtttgctagcggcattgtgtggggaaagtgtttttctacttggtcctccaggcatcgcaaaaagtttgatagcccgccgattgaaatttgcatttcgtgatgccagagcatttgaatatctaatgactcgcttttcaacccctgaagaaattttcggccctctctctattcaggcactgaaggaagaaggacgttatcaacgtctaaccaacggatacttacctgaaactgaaattgtcttccttgacgaaatatggaaagccggcccggcaattcttaataccctactgactgcaattaatgaaagaaaattcagaaatggggatacagaagataaaattccaatgcgattacttataactgcatccaatgagctacctgaagcagataacagtctggaggcgctttatgacagaatgctaattcgtatctggctggataaaattcaagaaaagaagaatttccgagcgttactctctagccacaaaaatgaaaatgataaccctgttccggcaaacattcaaataacaagtgaagaattccatcaatggcaaaaagagattgataaaatagttttaccagacagttgttttgatattatttatcatctacgtcagcaacttgatgcaacagaacattcaccttacgtttcagacaggcgctggaagaaagccattcatttattacaagcaagtgctttcttcaatggcagaaaagagatatcacctcttgatttaatattactgaaagattgcctgtggcatgatcttcactcttttaaattattaccccaatacttgaatactctgatgaccgaacaagcatataggcaaagaatattatctcaacaaattgattcgctttatcaccaatggactcaagcctgtcaggataaaaatgatcagcaggcgttaaagctggaaaaacaaacccgtctgtttggacgtaaaatacaatattctctacccgatcatatcaatgaagaaaaattgattctattcctgcatacacctcttcatctccatgatattaaagttaattttattgaattggaaaaaaaagcgttgaatatctggataaacaaaggcagagaattatcagcacgtctgaacggcattggttttccacaaaatatagcagccgaagttaattcagcacatcagccagagatttttgatatcagccgccgttcatccacgctatatttaccagatcatcaacatcagcaaaatgaagaaaacaacgagtggcaggaaagattagaaaaatttaatcaagaaatccatcaccaacaccaattgtttaatcagcatcagccatgtttatttattgaaagtcattggcttgctacgatagagcaaagctttatccagttatcagataaaattaagcagttgaaaataaaaataggcagctaattaaatgattagtttgacaacccttgatctcttactgtcaataaacgaaggagagatgatagaagagatcatattaacgcttttagcttcacctcagttagctatcttttttgaaaaacatcctcgcttgaaacgtgcactattaaaagatatccctggctggaaacacgatttacagcaaaggattaaagaagcgctcattcctgtaactctggcagaagaatttcagttatatcaacaaatactgtctgccaatacaaattatttttaccttaaacttcccgatattttagaaacgctgaaccgaattgaatccccttttagtgaagaagcacagaaactcgcaaccaacaccattgctgattcaaatacactacaaaccctatttattcaacgatggaggatcagtttgatcctgcaaactacaaccttccataagcaattgctggagcaagaaaaagagcaattactggcagaactgcaacaaaagctgacactaagcggtaatcttgatcctgtttttagtgaaaatgatagggcagcggggcgattatgggatatgagcaaaagtcagttaaatcattctcaaaatgataagcagttattgatccactatagtgaatttcttcaccaacagccggaactgaaaaaattagctcaattacttggacgcagccaatctgtaaaatcaaaaccacaagaaaaccattttttcgaaccagttactacaatcgagcgaacacccgacatcattcctgaacaggtaaatggtatcggacaaagtgatgatattctgcgcctattaccaatagaattagcaatattaggaattgaagatctggaatatgagttttatcgcaaattagtggaaaaaaaactcctgacctatcgcttacaaggtgataactggcgagaaaaaacaacattacagccagtcactcattatagccaggaagaaaaacctcaaggaccatttattatttgtgtagatacttccggttctatggggaaattcaatgaaaaatgtgccaaagctttttgtctggcactgttacgcattgctctagctgataatcgcaactgtcatatcatgctatttacaacgggaattgtgcactatgaactatcttcaccagatggtctggagcaagctactcgttttctcagccaaactttcaaaggagggacagatctcgctttctgtctgacaagcacaatagaaaaaatgaaagaaaaatgttggaaaaatgctgatgctgttgttatctcagatttcattgcccagcgtctgccgaactcactaatccatcagataaaaaatctgcaactgcatcagcaataccgcttccatgcggtctccatgtcccaatatggtaagcccgatattatgcggatatttgatcatatctggcactttgataccggacttaaaagccgtttactgcgaaaatggcgtcactaacttgaattaaagcatatcttctacagtttcgcgtacttcaggtgaccagatactgcactgaacttgaccaatgtgtttcatttgcagcagtaacatcactaagcgggattgaccaataccgccaccaatcgactgcggcatgtcgcctttgagtaacgcctgatgccaatcatattgtaaacgctcttcatcactagtcagagctaactggcgctccaatgcttctgcatcaacacggatacccatagaagagatctcaaacgcatcttccaaaacagggttccagacaatgatgtcgccatttagaccaacgaaaccatcgctgtttggtgtcgtccagtcatcataatcaggcgcacgcacatcatgagattgaccatcagataatttcgcaccaataccaatgaggaaaacagcacccaattctttagcaatagcccgttcacggccttttgcatccagatccggataacggctcagaagcgtttcgctatgaacaaagtgaatttgatctggcaggaacggtgccagaccaaactctttgttgacagctttttctgtttcttttattgcttcgtagattttacctactgtctgtttaagataagcaagtgagcgttgcccatcttccatcactttttcccaatcccattgatcaacataaacagagtgaattggtgttaagcgatcctcatctggacgcaatgctttcatgtgagtgtaaagcccttgttcaggctgaaagccaaaacgacccagtgtcctacgtttccatttagccaacgaatgtacgacttcgaaagttgaatccggtaaagtttttactttcacctgaacagctttttcatggccggacaagttgtcctgaataccatctcccaaacaacttaggattggtccctgtacttcaatcagacccagtttgctttccagcagacgggaaaagaaggatttaacaaaactgatttgttgctgcttttcaataaacgactttttcataatgttattctctaattttttaggtgaccctgatgtcctgttggaaacattaagcaataaaatgagggataaattcaatatactttaataaaaatagactttatgattcataaaattcatttttaagattaaaaaaatgaaaattcattaaaaaaaggcgctgaaaatggcagaaatttatcagatcgacaatctagaccgtgacatacttcacgctttaatggacaacgcacgtacaccttatgccgaactagcaaagaaatttgctgtcagtccgggaacaattcacgttcgcgtggaaaaaatgaagcaagcaggaatcattaccggtaccagagtcgatatcagcacgaaacaacttggttatgatgtgtgttgctttattggcattattctcaagagtgctaaagattacccatcagctctaaaaaaactagacaacctggatgaagtagttgaggtttactacacaacaggccactacagcatctttattaaagttatgtgccgttcaattgaatcccttcaagatgtacttatcaacaaaatacagactatcgatgaaattcaatcaacagaaaccctgatctccttacaaaacccgattatgcggacaatcaagccataacataaaatttgttataaccatattatccacaggtagatcccaacagattcacagcgtacaatagcgactcttaaaatctgttgggatcactatggctactattaccttaatcagcggcagcacaatgggcagtgccgaatatgtagctgaacatatggctgaaattctggaagatgctggtttttccactgaaatgctacatggcccctccttagatgaacttcctcaggaaggaatctggctagtcgtcacatccacacatggagcaggagaattgccagaaaatatacaaccattggccgcagaaatttctgaccaaaaacccgatctcagcaaggtaacgtttggtgctgttggccttggtagttccgaatacgatactttttgcggtgcaataagatcatttgaccaactattgatagaaaatggtgctaaacgtctcggcgatcgtctggaaattgatattcaacaacatgagatccctgaagatccagcaggagaatgggttaaatattgggcaaacacactctaataagaacaaaaaaacagcaaacgattgtggataactcatctaaaaagccggggttaacccgtagttatccatagtataactatatgacaatgatcaccttgtgaataactaccgatttagatcccagtttataccttgtgggatcacggatcattcacaacaaatgatcctttacagctttatgatctttctaaggaaaaataacttatccacaaaagatcatgatcctaataaaagatctaataaacagatctttaaataaaaaagatcttcttttaattaccggtgatctcacccacttggtctatcaccgaaacttgagtagaattctcctcccttaatgcaacactgagcatttttataactaaaggttcatcaccatgttttatccagaacaatttgacgtcatcattatcggtggtggtcacgccggtaccgaagcggctatggcagccgctcgtatgggtcgtcaaaccctattgctgacccacaatattgacactttgggccaaatgtcatgtaacccagccattggtggaatcggtaaagggcatctggttaaagaaattgatgcgcttggtggcttaatggctaaagcgactgatcaagctggtatccaatttagaactttaaatgccagcaaagggcccgcagttcgtgcaacacgtgcccaagcagatagggttctctatcgtcaagctgtacgcatggcattggaaaaccaacctaatctaatgatcttccaacaacctgtagaagatctcattgttgaaaatgacaccgttactggcgcagtaacacgcatgggccttaagttcagagctaaagctgttgntttgactgtaggaacatttcttgacggtaagatccacattggtttggaaaattatagtggtggaagagctggtggtcccccagccatttcgttggcacagcgcttacgtgaattgcctttacgtgtaaacagattaaaaacaggaacaccaccacgtattgatgccagaactatcgattttagtcagctaacacaacaactaggtgataatccaacgccagtattctctttccttggaaatgtgaagcaacatccacaacaaataccgtgttacatcacccatacgaatgaaaaaacccacgatgtgatccgcaataatttagatcgtagcccaatgtatacggggatcattgaagggatcggtcctcgctactgcccttcaatcgaagataaggtcatgcgttttgcggatcgtgatgcccaccagatcttccttgaacctgaaggattgactagtaatgaaatctatccaaacggtatttctaccagcttaccgtttgacgtacagatgcaaattgttcactccatgaaaggaatggaaaatgctcgaattattcgtcctggttatgcaatagaatacgatttcttcgatccaagagatctgaaacaaacattagaaagtaaatttatccacggtctattttttgctggacaaatcaacggcacgacgggttatgaagaagcggctgctcaaggactcttggcaggccttaatgcagctcgttacgcttcagaagaagaaagttggttccctcgccgtgatcaagcttatattggcgttttagttgacgatttatgtactttagggactaaagagccgtaccgtatgtttacttcacgagccgagtatcgcttaatgttacgtgaagataatgcagacctgcgtttaacagaaaaaggccgtgagttaggtctggtagatgattcacgttgggaacattattgccgtaaattggaaatggttgaacaagaacgccagcgtttacgtaatatttggattcaccctaattcaaataatcttaatgatataaacaatatattgaaaatgccattgtcgaaagaagctaatggtgaagatctactacgtcgtcctgaaatgaactataaacttttgacctcattgcccctgttttctccaagtcttgaagaaccacaagccgctgatcaagttgaaattcaggtcaaatacgagggatatattgcccgtcagcaggaagaaatcgaaaagcagctacgtaatgaaaacacatcattaccagtcgatctcgactaccgccaaatcagcggtctttccaatgaagttgtcgctaaactcaatgatcataaaccgagttcaattggtcaggcttcacgtatttcaggggtaacacctgcggcaatttcaattttacttgtgtggttgaaaaaacaaggattattgcgccgcagctcctgagaggatcttgattatgcttaacaaactagaattgttgctgaccaaagcaggaatagaactgtcactacagcaaaaacagcagcttgtagcctatgttgatatgctcaataagtggaataaggcttacaatctcacatcagtacgtgagccagaacaaatgctggtgcgtcatatcatggacagtattgttgtcagcccttatctgcaaggccatcgttttattgatgtgggcacgggcccggggttgccaggtattccgttagctattgttcgtccagattctcatttcacattgctggatagtttaggcaaaagagtgagatttttgcgtcaggttcagcatgaacttgatttggtaaatatcgaaccagtacaaagtagggttgaagcgtattcttctgaaccaccttttgatggcgtaataagccgtgcttttgcttcgttaaaagatatggtctcttggtgtagtcatttgcctgagcctattcatggacgtttctatgcacttaaaggtgtgcttccagaagaggaactgactatcttgccttttggaatttctatcgattcggttattaaattaaatgttcctgaactggaagggcaacgtcatttggttatccttaaatcaaactaattttgttatttgtcaataaagttataaataattagtgatgttgagcacaattatactgtagtcagcatcgttaattatggtttgcatcgtttcagctttaatttaccgagttattacataaaaataacgttatcttgatattaagatagttgaacctttaaaaatcagataaagcattttttcatcagatccacttttttaaactagctaaaaattagcttgggaatttaagtcaataatataatcactcttttgtatggaattaaattaaccaattgattttattattaatgtattttattttcatttactgtgaatgttaaatataattaacaaataaaaaatttatgtgatttaaatcacatttgtgcctgaaatgtatgaaattattaaaaacaagaaatcagcacaatcattagcttgcaatcgggcactaaaataaaaaatttaaataattgttcaccttttcgctacttatagattgaattcattttggtggcccgtataatttgcacgtttttgtcacttgacactcttaagcaaaggcagttttatacaacatttagcaaaacctgatatgcaaggcgtgcaaggggagaaaacaaaagtcatgtctgtatccctttacagcggtaaaattgcactgaagctgctttttttgcagttaatgacttttgttgttctcagtgtggctttttgcaccaaaagtatagaatggggcgcttctgcttttgctggtgggttagcatgttggttacctaatgccatattcatgctgtttgccagttttcaaaaagcaaaagaagaagaggttcctgtacgtattgcgtggtctttcgctgttggcgaagggttgaaagttattattacaatagctgtgctggttgttgctttaggcgtgtttaaagcggcgtttgcaccactaggtttagcttatttagcggtgctgattgtgcaaattatcgcacctgctgtgataaacgattaggttttcaacaataaaagggtaagaggcatcatgtctgcatcaggagaagtttcaactgcaagggactacataggccaccacctgaataaccttcagttggacctacgtacctttgagttggtcgatcccaactctggtggttctgcaacgttctggacgttgaacattgactcgctttttttctcagtcgtattagggattttatttctgtatgtattcagaaaggttgcggttaatgccaccagtggcgtacctggcaaacttcagactgctatagaattgatcatgggttttgttgataacagcgttcgtgatatgtatcacggcaagagcaaggttattgcccccttggcactgacagtgttcgtttgggtgttattaatgaacgtgatggacttattgccaatcgattttctcccttatatcggtgaacatttctttggtttacctgctctgcgtgtcgtgccaacagcagatgtcagtgttaccttgtcgatggctattggtgtctttgtcctcatcctctactacagcattaagatgaaagggattggtggttttacaaaagagctgactttacagccttttaatcatccactgtttattccaattaacttaattctggaaggagttagcctgctttcaaaaccggtatcactcggtctgcgactgtttggtaacatgtatgcgggtgaattgatctttattcttatagctggtctgttaccgtggtggtcgcagtggttactcagcctgccttgggctattttccacatactgattattacgttacaagcctttattttcatggttctgacgattgtttatctgtcgatggcatctgaagaacattaattttttaccacaataactaactgtgttttaactgaaacaaactggagactgtcatggaaaacctgaatatggatctgctgtacatggctgccgctgtaatgatgggcctagcggcaatcggtgctgcgatcggtatcggcatcctcggaggtaaatttttggaaggcgctgctcgtcagccagatttaatccctcttctgcgtacacagttctttatcgttatgggtctggttgacgccatcccaatgattgctgtgggccttggcttgtacgtaatgtttgctgtcgcgtagtttgtagaaataatctgaaactacgtcaactcattaattttaaaagaggtattgtgctgtgaatattaatgcaacaatcctcggccaggccattgcgtttgtcttgtttgttatgttctgtatgaagttcgtatggccaccgatcatggcggccatagaaaaacgtcaaaaagaaattgctgacggtttatcttctgcggaacgtgccaaaaaggacctggacttagcgcaagccaatgcgaccgaccaaatgaagaaagcgaaagtggaagctcaggtcatcattgaacaggctaataaacaaaaagcccagatccttgatgatgcaaaagcggaagctgagcaggaacgtaacagaatcgtaacgcaagctcaggcagaaattgatgccgagcgtaagcgtgctcgggaagagttgcgtaagcaggtcgctatgttggctatcgcaggtgccgagaaaatcatcgaacgttccgtggatgaagctgctaatagcgacatcgttgataaactggtcgctgaactgtaaggagggaggggcatgtctgaatttgctactgtagctcgcccctacgccaaagcagcttttgactttgctgtggaaaaacaatcgcttgaacaatggcagaatatgctggcgttcacagctgaggtgactcgtaatgagcaagttggtgagctgctttctggttcattggcatcggaaacattagctaatacctttatcgcaatttgcggtgaacaggtcgatgaacatgctcagaactttattcgtgttatggcagaaaacggtcgcttattggcattgccggaagttttgcagcaatttattcaattgcgtgcatcacttgaatcaaccgttgatgttgaagtgatttctgccaccgaactgagagaacaacagctggctaaaatttctgtagcgatggaaaaacgtctgtcacgcaaagttaagctgaattgcaaaattgataagtctgttattgctggtgtggttgtccgcgcaggtgatttggtgatcgatggcagtattcgtggccgtttagatcgcttaacagacgtcttgcagtcttaaggggactggagcatatgcaactgaattccaccgaaatcagcgaactgatcaagcagcgcattgctcagttcaatgtagtgagtgaagctcacaatgaaggtacgattgtatccgttaacgacggtatcattcgtattcacggtttagccgaagttatgcagggtgagatgatcgcactgcctggcaatcgttatgcaatcgcattgaacttggagcgtgactccgtaggtgcggttgtaatgggtccgtatgctgacttagcagaaggtatgaaggtcaaatgtacaggccgtattcttgaagtacctgttggtcgtggtctgcttggtcgtgtagtaaacacgctgggtgagccaattgatggtaaaggccctgttgagcatgatggtttctctgctgttgaaatgatcgctcctggtgttattgatcgtcaatctgttgatcagccggtacaaactggttataaatccgttgacgctatgatccctatcggtcgtggtcaacgtgaactggttatcggtgaccgtcagacgggtaaaacagcactggctattgacgcaatcattaaccaacgtgactcaggcataaaatgtgtctatgtcgcagttggtcagaaagcttctactattgcgaacgttgttcgtaaattagaggagcatggtgctcttgccaatactattgtggttgttgcgactgcttcagaatctgcggcattacaatacctggcaccatattcgggttgtgcaatgggcgaatacttccgtgaccgcggtgaagatgcgctgattgtttatgatgatttgtctaagcaggctgtagcttatcgtcaaatttctctgttgctccgtcgtccgccaggacgtgaagcattcccaggtgacgttttctatctgcactctcgtctgctggaacgtgctgcacgtgttaatgctgaatatgtggaaaaattcaccaatggtgaagtgaaaggtaaaaccggttctctgacggccctgcctatcattgaaactcaggcaggtgatgtatcagcattcgtaccaacaaacgttatttcaattactgatggtcagattttcttggaatctagtttgttcaatgcggggattcgtccagcagttaacccagggatttccgtatcccgtgtaggtggcgctgctcagactaaaatcgttaagaaactgtctgggggcattcgtactgctctggctcaatatcgcgaactggcagcgttttctcagtttgcttctgaccttgatgatgcaacccgtaagcagttggatcatggtcaaaaagtaactgaattgctgaaacagaaacagtatgcgccaatgtctgttgcacagcagtcattgtctctgttttctgcggaacgtggttatctggaagatatcgaaattgctaaggttattgatttcgaatctgcgttgcttgcatatgccaaccgtgaacatgctgatcttctaaaagagattgaccagtctggtggttacaacgaagagatcgaagcaaagctgaaagctctgctggattccttcaaggcaactcagtcctggtaacactattcggcccggtttaattaaacatgggccgtctggttaatgaggagaatcaggaatggccggcgcaaaagagatacgtaccaagatcgccagcgtgcaaaacacgcaaaaaatcactaaagcgatggagatggttgctgcgtccaaaatgcgtaaaacgcaggatcgcatggcggccagccgtccttatgcagaaaccatacgcagcgtgattggtcaccttgcgttaggtaatctggaatataaacatccgtaccttgaagagcgtgaaaccaaacgtgtcgggtatctggttgtttctaccgatcgtggcttgtgcggtggtttgaatactaatctgttcaaaaaactgctttcagaaatgaaagactggtctgataaagatgtccagtgtgagctggcgcttatcggctctaaggctacctctttctttgcttctgttgggggtaacgttgttgctcaggtaacaggcatgggagataacccttcactgtctgaattgatcgggccagtgaatatcatgctgcgggcatacgatgagggacgtctggataaactgtatgtggtgacaaacaagttcatcaatacaatgtcccaggaaccgactattactcagttattacctctgcctgccggagatgatgaaacactgaagaagaaatcctgggattatttatacgaacctgatcctaaggcgttgctagatatactgctgcgtcgttatgtagaatcgcaggtttatcagggcgtcgttgaaaacctggctagtgaacaggccgcacgaatggtggcgatgaaagccgcaactgataatggtggcagcctgatcaaagagttgcagttggtttataacaaagctcgtcaggccagcataactcaggagctgaccgagattgtctcgggtgcttccgcggtttaacagctaggtttatgaattacgtagaggattcaagatggctactggaaagattatccaggtaatcggcgccgtggtggacgtcgaattccctcaagataccgtaccaaaagtatacgatgctcttgaggttcaaaacggcgaagctaagctggtgctggaagttcagcagcagttgggcggcggcgttgttcgttgtattgcaatgggtacttctgatggcttaagccgtggtttaagtgtcactgatttaggccacccaattgaagttccggttggtaaagcgacattgggccgtatcatgaacgtattgggtgaaccaatcgacatgaaaggcgatatcggtgaagaagagcgttgggctattcatcgtccggctccaagctatgaagaattatctaactctcaagaactactggaaaccggtattaaggtaatggacctaatttgtccattcgctaagggtggtaaagttggtctgtttggtggtgcgggtgtaggtaaaaccgtaaacatgatggagttgatccgtaacattgcgattgagcattcgggttactctgtatttgccggtgtaggtgaacgtactcgtgaaggtaacgacttctaccacgaaatgactgactctaatgtactggataaagtatctctggtatatggtcagatgaacgagccgccaggaaaccgtctgcgtgttgcgttgacgggtctaacaatggctgagaagttccgtgatgaaggccgcgatgttctgttatttgttgataacatctatcgttataccttggcaggtactgaagtatccgcactacttggtcgtatgccatctgcggtaggttatcagccaactctggcggaagaaatgggtgttctgcaagaacgtattacttctaccaaaaccggctctatcacttccgtacaggctgtttacgtacctgcggatgacttgactgacccatctccagcgacgactttcgcccacttggacgcgaccgtagtactgagccgtcaaattgcttctttgggtatttatcctgcggttgatccgttggattctaccagtcgtcagctcgatccattggttgttggtcaagagcactataatgttgctcgtggcgttcagtctatcctgcaacgttatcaggaactgaaagatattatcgctatcttgggtatggatgaactgtcagaagacgataagctagtagttgcgcgtgctcgtaagatccagcgcttcctgtctcagccgttcttcgttgcagaagtctttactggttcaccaggtaagttcgtttccctgaaagatactatccgtggctttaaaggtatcttagacggcgactatgaccacctaccagaacaggcattctacatggtaggtaccatcgaagaagctgtggaaaaagcgaagaaactttaatacggctgaccggaggttgacatggctgcaatgacttaccatctgaatgttgtcagtgctgaaagccggatgtttgaaggcttggtacagaaaattcaggtgacaggtagtgaaggtgaactgggtatttacccagggcatgctccgctactgactgccataaaacctggcatggtacgtattgttaagcagttcggtgaagaagaggtcatttacctttctgggggtatccttgaggtacaaccgagcggcgttatcgtactggctgacactgcgatccgtggtaaagatttggatgaagctaaggcgttggaatctaaacgtaaagctgaagaacacatccgtaattctcacggtgatgttgactatgctcaggcatcagctgaattgtctaaagcgattgcgaaacttcgtgtaatcgagttaacaaaaaaagcgatgtaatataggcagttaaataaaaaagccagttggtgcgagctaactggcttttttgtattgcgaaatatgtagtaatttatcttataagcaggtttacttttctctcttaaattggagttatcgggtttcttatgtctaacagtgcaaaaagtgttgtgatccttgccgcgggtaaaggaacccgcatgtactctgatctccctaaagtgctgcacttgctggccggtaaacctatggttcagcatgtgattgatactgcaatggcattaggggctaaaaatgttcatctagtttatggacatggtggtgacctgatagagcaaaccctttctgatcaaacactgaactgggtattacaagcagagcagttagggactggtcatgcgatgcagcaggcagcaccacatttcgctggtgatgaagatattttaatattgtatggcgacgtaccgcttattggtgcagatacccttgaacgcctactcgctgttaaacctgagggtggtatcggtttattgacagcaattttggacaatccaacaggttatggtcgtattgttcgtgaaaacggagaagtaacgggcatcattgagcaaaaagacgcgactgaagaacaacgtaaaatcaatgaaataaacacaggtattttggttgctaatggtagtgatttaaaacgttggttgtcccaattggataacaacaatgttcagggtgaatattaccttactgatgtgattgcgttggcttataaagaaggtagaaaaattgaagcggtgcatccaactcgcttgagtgaaatggaaggtgtaaataaccgtcttcaactttccgctcttgaacggatttatcaatctgagcaagcggaacaattattactagcgggtgttatgttgttggatcctgcccgttttgatttacgtggtacattaattcatggccgtgatgtggttattgacactaatgtcattattgagggtaatgtaacccttggtaataacgtacagattggtaccggttgtgtgttgaagaattgcatcattggtgatgattctattattagcccctatacaatagttgaagattctgaaatggaaactggttgtactgttgggccttttgcacgtttgcgtcccggttctaaacttgctgaaaaagcccatgtagggaatttcgttgagatgaagaaatcttatctgggtaaaggttctaaagctggacatttgacttatcttggcgacgcagatattggtcgtgatgtaaatattggtgcaggtactattacctgtaattacgacggcgctaataaatttaagaccattattggtgacaatgtttttgttggctctgatactcagcttgttgctccggtgattgttgctaaaggcgctacaatcggagcggggacaacagtgacaaaaaacatcgctgaaaatgagctggttgtaagcagaactaaacaaacacatattcaagggtggaaacgccctgtgaaggaaaaaaaataaaataataatccccactctacaggctcggggaccggaaaaaccggaaaacaatcaggctcttgacatataaagggctttcatcagccctatttttaggaataaaactgatgtgtggaattgttggtgcagtagcacaacgagatattgccgaaatcctgattgaaggacttcgtcgtttggaataccgtggttacgactccgctggtttggcggttgttgataacgaaaaaaatatgttccgcctgcgtgaagtcggtaaggtacaagtacttgctgatgaggttgataagcagccagtccttggtgggacaggtattgctcatacccgttgggctacacacggcgaaccgaacgagaaaaatgctcacccgcatgtatctgattatattgctgttgttcacaacggtattattgaaaactatgaagaattacgcgttcaattaattgcactcggttatcagtttatctcggatactgatacagaagttattgctcaccttgttcattgggaacaaaaacaaggtggtactttgttggaagctattcaacgagttattcctcggttgcgtggtgcttatggtgcagtcatcatggatagccgtgatcctggaacaataattgctgcaagatcgggcagtcctttagttataggcttgggcgttggagaaaactttctggcgtctgatcagttggcgctattgcctgttactcgtcgttttatcttccttgaggagggggatatcgctgaagtcactcgtcgtactgtgcgtatttttaatactcagggcaaaccggttgaacgggaacagattgaatccaatattcagtacgatgctggtgacaaaggtatctaccgtcattacatgcaaaaagagatctatgaacagccaatggcaattaaaagcactttggaaaggcgcttgagtcatggacaagtagatctgtctgaacttggccctaatgcagctaaattattagctaaagtagagcatattcagattgttgcctgtggtacatcctataacgcaggtatggtttcccgttattggtttgaagcattggctggtattccttgtgatgtggaaattgcttctgaatttcgttaccgcaaatcagcacgccgttcaggaagcttactgatcacattgtctcaatcgggtgaaactgcggatacattagcagcactgcgtttatccaaagaacttggctatctcacatcgttaactgtctgtaacgtagcgggttcttcattagtacgtgaatctgattttgctctgatgaccaaagctggtgcagaaattggtgttgcttcaactaaggcatttacaactcagttgacagtattactgatgctggtggcttaccttggacgtttgaaaggtgttgatgcagaacaggagcaagaaattgttcatgcattacatgcattgccaagccgtatcgaaggcatgttatcgaaagataaaattattgaagtgctggcggaagatttttctgacaaacaccacgctttattccttggccgtggtgatcaatatccgattgcggttgaaggtgctctgaaattaaaagagatttcttatatccatgctgaggcttatgctgccggtgaattaaaacatgggccattggcactgattgatgcagatatgccggttatcattgtagcaccgaacaatgaactgctagaaaaactgaaatctaatatcgaagaagtacgtgcccgtggtggattgctatatgtttttgctgatcaggacgcgggttttaccgatagtgaaggaatgaagattattccattgccgcatgttgaagagctgattgcaccaatattttatacagtaccactgcaattgctttcctatcatgttgctctgatcaaaggaactgatgttgatcagcctcgtaatttggctaaatcagtgactgtagaataatcgttttatagtaagaagttgaaataagcctctgtacattaaaaatacagaggcttttttttgaactgagaaaatttctcattattttcttgccgataaaaataaatcacgccattgtaatgttatattattacaatttggcgaaattatgaaaccagatatccatccaaactatcgggtagttgtatttcacgataccagtgctaatgcctattttacaattggctccacgattcgcacagaacggacaattactctgaatggggaagagtatccatatgtcactgttgatgtgtcatcggaatcacaccctttctatacgggtaagcagaaaactttatctcaggaaggcagtactgcgcgattccagaaaaaattcgggcgttttattggtaataaataaattgagagatcatggaaaaatgcaggtgttaagttcacttaaaacagcaaaaactcgtcatccggattgtaaaatcgtcagccgtcgtggtcgattatatgttatttgtaaatctaatccgcgttttaaggcagttcagggaaagaaaaagagacgttgatatccaattactaatagtagaactcgcagcttataactgcgggtttattgtccatatttaattttacttctgattatcttaaaaataactgacctaaactttatttgggagtgtagttagcgtaattaagtttaagataaataagatttagattttatgcaaaatgaaaccttattagtgcttgttgtatagtataaagttaaaccttaaattggttgcttttactacaaatttatcctccaaaatagttcataatttactcttatcaacacattttttcataaaccacagttctggtcatttattgacacccgaatatagccaatcttcgccatatgtaaccctgcctaataccagtatgagactattattgtcgaaattatcacgggttggcgagcttttaaaaaccttggtttgatagaaacgatgaatttggcgaaaaatgctcttcctaaggactcaactgaatcattcacatcaggcaatcacaatattaaaacaggtggaaattattccagtttgtcactaacaaagggagatggccgatatgttttcatagaaactacttctcatgaagaaggatctttttgtgcaataggacatcgtgagtctaattcctcaaatataaatgttgttcacctccctcgaaagagtggctatattgcaatagctaatgaacattattctaaatcagagtctgacagtcgatttattcagttaaataccgatacaaaaacatcaggttatatattagttaaaaccgcaaactattatgatgatcctaattcacgtcatttggggcgttcgggatttttgaggcccaatggaattgataatctgggggcattagcaattcatatagctcatcctgacgttgatagtccgcagcacgctcgtgggctttctttcggatatggcggttattcagaagcattcagcgtttctacttatgctttcgatgaaagtggtaactttagggggaaacgtaaaatattaacagaggatgatattcttgttggtattccactaccgtggtctaaaccaactgcaccagcaggttatcttatttgtagtggtcagcagtttgacaaatctatgtaccctaaattaggggaagcatatccctctggtgcactccctgatctacgtggtgaatttattcgaggttgggataatgggagaagtattgattctgggcgggagattttatctcatcagaattcaacaaagttaccgaatctttacacccatgcagcctctgaaaatatagggctactggtatctcctcctattaatcatttttcaagtaattatccatcagaaattatggctagtgattttgaggaagcagaattcgggagcggccaatatttttcgaccccattaaatcctactggttcagtttcattatctacatttagagtacgtccccgtaatatcgcatttaactatatagtgagagcagcgtaatgataacacagaaacaaaaatattccctagaactagaaaccgcaatattgggaaataatggattagcaaccaaagccggttggttgataatctaccatgcagagccttattccagagaatttattggtgccagaccagaatatttaatggaaggagtgggacttcctgccaattcttatccagatgcaccacaacttccagattctgatgacatggctgtttgccgcagcgaagataaaagttgttggcaaattgtacctgattaccgaggaaaaatagtttataacacacaaaccttagcacaatatgaaattacagagttaggtgaactaccagaatctctgacattcaaacaacctgtcactgattttgataaatgggatggtaaacagtgggtaactgacaaatatgcaataaaggatagccagattaaacaggcagatcagcagcgggtagcactattacgacaagcgaatgaaacagttacattattacaacatgctgtagatattgagttggtttcagaaaaagaaaaattattgttgttagattggaaaaagtatttagtattgcttagccggattgacatttcatcagcaccagatattaactggcctgaaaaaccagaataaataataacggcctgtttttcaggccgtagatttaagacttataaactaaattgnagggagtttatcatttctgaaaccatttttatattaaattaatcaacagctttttcagtaaacgtttttaattcttgaaataaaaatctcacaattaatttcagtaatttatgtatttatatttaattacatgttgttgtaattaaaacattaacattcaatgtcttctagtatcctacaaaaatcactaataataacaaggaaattatagttgattgtttttaatcattggtgttgttttgaatatagaatggaaagtttttaaaattatataaacagccaactcaatatggatggctatttataaatttcaatgttaaattttaattaaattaacaaatcaccaccttaaaaatgattaattttattctggtttttccggccacttaatatcttttgccgtggtatccattctatttaacgccacgcgatattttttcaactccatcaacattgttatttcactatcagtagcaatgcctaaatcaatagcatcttgcaatggtgaaattttaattgttgcttgttctaataaataatatttttggcggtgataggttttatttttctgttcgataatggcttgctgatataatgcttgagcttcttgagcactgaaacccattgagattaattgatggggttcagctggcacattaacatattcatagccatttttgtctattaatttatttaatattatcatatatcctcattacggtttcttttgataacgcgcgtcatattcaagagaataaggtactgtattatcagtatattcttcacctaataatggatcattgatggctaatgatttcaccatccacttcatttcccgtttaatatcttcacttgaccatctatgtatttctgcctctccttcttcacgtgaataatggattgactgaaaattgcttgtcgtaaaataggttaaaccaccacgtaaataacaaccactataaacgtaacaatctacaatatcaccggattttacatcaccataaaggggatatttgccgtcaatgggtctagcgatgcttatcatggcatgatggattgcttttaccgttttacgataggtttgatttatgcgtttaatattaagatagcgggcatcacctccccatggcacatctcctccttctatttgtacaagtagtccagcaacatgtgtcacaccttcaccgaatggttttttttctgcatcatatggatagggtctatgaagtgttaaccaagaattcgctccgacattaggtgggaggctccaccaaaccggataatagcgttcagtacttaggccagtaagatcaatcgtggtggtatagcgcggttcactctgaatatccgatgccgtgggtctattgagcgtgttatattcttgagcccaaggtgtccacggtaaattatgatattggctgcgcgtatatactcgactactgttataaacaaaataacgctgaatgatccctgcagcctgtaaaacaacaagcgaaccagcaagcggttcagggtagttagcaccattttgagcataaagattgtaatcttgataataaactcctggtattttgtagttatccaaatttgccttatcacccaaataaaccacttgcccattaaagatatcctgagacgtaatattgatatcctcagtcagaactttgccattcactttccggctattttgcactgctccctgagccaaattcatcgtttctatcaaaccaaggtttttaaaaactcgccaatccgtgataatttcgacaataatagtctcatactggtattaggcagggttacatatggcgaagattggctatattcgggtgtcaacaaatgaccaaaacagtgatttacagcgaaacgcattgataagtataaattgtgagcaaatttttgaggataaaattagtggaaaaacatccaacagaccaggtttaaaacgagctttaaaacaacttaaaaaaggtgacactctagttgtttggaaactagatagattggggcgtagcgtaaaaaatatggtaactttaatttctgatttaagtgaacgcggtattcattttcaaagcttgactgatagcattgataccagcacttctatggggcgatttttctttcacattatgagtgcactagctgaaatggaacgggaattaatcgttgaaagaacgaatgcaggattaatagcggctcgtgcccaagggcgaattggtggtagaccagtatcactttcattcgttgaacaacaacaagcagcaagattgctggcgaaaggccacacacggaaacagttatcattaatttacaacatatcgttatctacaatatataaatattttccagtaaataaaacaaattgtcgatcaaattagtatttgcagtgcggctagttaaatgtttaattttgtattcgtaatgtccaaggctaattggttattaatttatgcaaaatatatcacgtttcttttctatacaaaaaacgtctgccgcactataagataaagaaacaacggaataagttgacaatcagctattgctagcaaaagaatctattgtgtatgaaatccactgcatctggacgtttttaggtaacgaattgccatcagcataggatttatacatctaagtaaattaatttacacttgaaaagtgtgtcagtacctggaaatcattaggtaaacgcgaccaataaagttgatttcattaattgcacaatcaaaagttacgtcattatcacaaactcggatcttactgactgggatttttgtaatttttttaatgctgtgcatgccttcaatatcaattaaccataaaccatcctgaacatcatgttcttctgtatctagcaaataccaggtattattattatcgataataagaggtttttttatttttctggcaataagttgattatctaaaatcactgggtcgtcatcgcttagctttccaccaaccaatttaacgcgttgtatttttggggtaataatgttttttaaagattcctttttcttttctcgatcagggaacatctctccttgtcctgtgcttagccataacaatgaagcattggtttcaaggttgcattgaataacccaatcggctggaaagctgtcccttaaataacggttcgccattgtgcttttagacacacctaaatggtcgctcaatgcttgacgcgatttaaacccatatgcactaacaaggcgttcgatagcttgttttcctccactatctgcacccatttttatctcagttatgttttttttcattgaaagtacagtttggtgagtttgccatctccacaaagccctctgattaagagctatagtgatcccaaataaatttattagatccgataggggatattgcatcatgggcatataaatttcaatctatatactttgtgaaactatatcatctaaataaagagaaaaaatcttctaatcgataaaataagaaaaacttattaattacaatggattgtgattggaaagaaacctttttaaccattaattattatttcaataaaaacaataattaatatattaacactatcaaatatagttctcaaaaaagatgaaaaaccactttaaatttttctaatcaaagtgtactgttcttatatacagttatgttatgcggaggtaagtttgtcagtggactttcttatggaatcagtaatagcgcaacgtattaattttatagccagaatggcaacgagctgtgaatgtaatcatgctgaagataaagaacttgctttagtttggattgctgagttgtcgacaccacttgcagaacaacttattaaccaccacgaaacgcttgaagaataaatgcggcagataaatgtgggaattctgtatgataaataatctaaagtttctaagttgataatgattgcattggaaaatgagctgagaaatagactttgcctatgaactcagcaaattttggaagatatgattaattataaattagccactgaaaagtggcttcttgcttctcatttgtactgtttccttaacaatattgtttcattggttctctcccactattcagcgcaccataacactttaacttaacaatattgactaaattagaggggggtatacctaatgaaaataattgcacagcagaatgatactgttgatgctttatgctggcgtcattatggtcggactcaaggcatgacagaacaagtactattagttaacccaggtttggctgaatatggtgtaattctgccacatggtacagaagttgagatgccggaaattatgacagctacaacgaaacctattttgcaactatgggattaaagatatccatactaatttgatggttttaaacagagttatcactctatacccaatggatttcaagatgcatcgcgacggcaagggagcgaatccccgggagcatagataacgatgtgaccggggtgagtgagtgcagccaacaaagaagcaacttgaaagatgacaggtatatatcaggaaattaaacttatctattttggctagataaataaacagttgaactggaacgttatacttaatatatagtcaagcagcgaaaatttgaattttttgaactattagagtcaaactttaacaaaagaattacctagtaacatagattacataaaggcccttctcgattacgggaggggctttttaatttatattgttatcttttcccttttcaagaaacttgttttgtctttcttacaattcctctttgatgttggcaactgtctttgctggcattctttcatacataaacccacaaccaccaaatggcatttttccaaacatggatacacaactaacagaacttttgcgcttattgcgtaatctgatcagaactggtgttgttaccgaggtagataccaaccggggagtgtgccggattgcaacaggcaatctcgaaactgactggcggccttggttaacaatgcgagcaggtaattcccgaacttggtgggctcccagccgtggtgagcaagttttgctgttatctgttggtggtgaattgaccacctcctttgtattgccagctatttattctaatcaatttccggagccatcgacttttgaccatattgattttcctgatagtggattaccagccatctattctaatcaatctgcggcaccatcgggtcgttctgaacaagctgttcatattgtttttcctgatggggcaagaatggaatatgagccgaaatttggagccttaaaggtaacaggtattaagactgctaaggtacaggcttcatattctatagatcttgaagcgacgaatataaaactaaaagcaaacaacgaaataaaactagagtcatataacgagattaaattggagtcatacaacgagattgggctggatgcaaaaaacaaaattgacttgaaagcactcaacaagattgggctggatgcaaaaaaagagctcgaactgaaatcacatgaagtcaagtgtgaagcagaagaaaaaatcgaattgaaggcatcagaactgacgttgaaaggtaacacgaaactggaaggtaatgtcgagaacacaggcggaaaactcagttctaatggtgtaaccctacattcgcaccaacacaccggtgtcatggcaggcggtgcaacaacaggaggcccagtataatgatgtaccttggaatgaatcgacaaaccggtcgtagcctgacggatttggatcatgtacgccagtctgtcagcgacatcttactaacccccgttggtagtcgtttggaacgtcgtacttatggctccctgctacccgaattaattgactggccacagaacgcggctctacgcctgcaaatgatggcagccacctatacagctatcagccgctgggaaccgagaattaatctgacagctatcaccataaatacccaacaagacggcaaaatgacagtagatatctctggtcattatcagctgtcccctggggggttttctctatctatccctgtgaggtaaaacaatgccgaccattgatctaagccagttgccgccacctgatgtagtcgagccactggattatgaaagcctgttggctgaacgtaaagccaaattaatatctctttatcctgaagagcaacgggatgctattacacgaacattggaattggaatccgaacctctggttaagttacttgaggaaaacgcgtaccgggagttgatattgcgccagcgggttaatgaagccgctcgtgcagtaatgttggcctatgcaaccaatagagatttagaccagttaggagcgaactataacgttactcgggcagttatggagcctgatagtaccttccgtgatcgtatccaaagagccttcgaagggctaagtgttgcagggccgataggtgcgtatgaatatcatgcccttaaagttaatgaaagtattcatgctaatagaaatgaatacaaaggcgaatatcaaactgttgcagatgtttccgtcgtcagcccatcaccagccaatgtgacggtgactgttttgtcgcggaaatggaaatgggaaaaagataaagaagacgaagaggataaagagcatagcggtgtagcttcacaagagttattggataaagtgattgcggcacttaatgacgaaaacgtcagaccggttgctgatcgggtaaaagtacagtcagccaacatagtggaatatcaaattgatgctgtgctttatctctatccgacacctgaatctgaacctatccgtaaactggctcaacaaaatatggataagtacgtgctagatcaacataagttggggagagatattcggttatctgccatttatgctgccctgcatgtcgcaggagtacaacaggtagaactgagagccccgacgaaggacataattctgtgtaaagatcaggctccttattgtaccggtgcaaaactggaaatagggaaaacacaaactgatgattgttccaagccaaatccaggtttgatagtgggaggttctgatgaatgaccgcctgttaccaacaggttctacggttttggaattggctgctgctaaggcatgttcgcaattgcagaatattccagtaccacttcgccaactctggaatcctgatatttgccctgaggaattactaccctatctggcgtgggcgtggtcggttgatcgttgggacgaaaactggcctgtaagcactaagcgggacgtaataaaaaattcgctatttctgcacaaacataagggaaccattggtgctgtccgtcgtgtggtagaaccgcttggctatctcattcaaataaaggaatggtggctgaacaacgaaacaccgggcacattccggttggcgataggggtacaggaaaatgggatcaccgaagaaacttttttagagctggaacggctaatttctgatgccaagcctgtaagccgtcatttgataggtttgtcaatcaacctggatgttaagggcgagttttattgcgctgcgacgagttatagtggagatgacctcactgtttaccaatatctccctgacgtcatcacaactagcgacaatgctcctttaggagctgcaattcatttgatcgagacagatacattgagggtttcaccatgaaatactttgcaattttaactaacctaggcgcggcgaaactggcgaacgctgctgctttggggacaaaagtcgatattactcacatggctgttggtgacggtggcggtaaattaccagatcctgacgtcaatcagacaaaattaattaatgaaaagcgtcgtgctgcaattaatacattaagtgtcgacccggtaaacacaaaccaaattattgccgaacaaattatccctgaaggtgagggtggttggtggatgcgtgaaattggtttgtttgatggtgaaggtaacttgattgcagtagcaaactgcccggaaacctataaaccacaattacaggaaggttcgggtagaacacaaactatcagaatgatcttgattgtcagcaatacggattcggtaacgctgaaaatcgatccctctgtcgttctggcgactcgtgattatgtagatagctctatccagaaacatgaaaaaagccgtaatcacccagatgccacattgacagagaaaggttttacaaaacttaatagtgccattaacagtaatgatgaaactacagcagcaacacccaaagcggtaaaagcagcttatgataatgctaatagtaaattggcaaaaaaccaaaatggcgcggatatcctagataaaaatgcttttgtgaaaaaccttggtttattggaaaagctaattccgataggtgtaccacttccttggccgacggcaacactgccggatgggtggttacaatgcaatggtgcggcctttgataaagcgaaatttccggaattagccaaggcttatcctggtggtaatttgcccgatttgcgcggggaatttattcgcggttgggatgacaaacgtggcgttgatccagaccgtacattattggtatggcaagaagggtcttatttactacaggaaactcaacaagctgctgataatgttgttaacttctcagttaatgagcgtacgaaattacaatgggatactccccaaaataaagatattccattaagagctagagcttctggaggttcagcaacaacctggactaccaatgcagcttatataggggtatcaaggccacgtaacgtagcgtttaactatattgtaagggcagcataatgctcatgtctgtacttgaagagatcccgggaggaataccgactgacataccaccaaatggttgggtgaaatgtaatggggcaatctttgataagtctttatatcccaaattagcggaaacttatcccagtggtagattacctgatttacgtggtgaatttatccggggctgggatgatggacgtggggtggatgtcggtcgatatctcctatcctttcaattggcagatattgctccacatagtcacagaattgaacggatgtggtccaactcaaatggtggaactgagaaggtgggtacaccaagctatattctcaatagtgtctaccaaaacgttaactacggtattgatcctcgcggactaggcatcgctatgggaatgggagctggtggtttcggttatatggataatgcgattgctgcttcaacaggaatagaaacacgcccacgaagcgtggcatttaattacattgtgaggattgcctgatgaataaggctgtactggataaaaataatattgctatcagtaccggaagtatcgttgtgtttaattacgatgcgattacgctggaatatttaaacagttctgatgagtatcttcccgttggtgtcggtcttcctgctaattcttgcacagacgtgccacctgataccgaagagggatatatcgcctgccgttcatctgatttaaccgattggcaaattgtaccagattatcgaggaaaaatagcttacgacacccaaactggggaacagaaggaaatcattaaaccgggcgaattaccagaaacactgacgtgcaaacaaccaaacactgattttgataagtgggatggtgaaaaatgggtaacggacattgaagctcaaaaaaacagtcagattgaacaggcagaacaacaccgtgtcactcttcgccaacaggctgatgaagtcatgactttattacaatatgctattgagactgagatggcctctgacacagaaaaagcattattgcttgcctggaagaaatatgtggtattactgagccgtgttgatacttcaatggtttcagatgttgattggccacaaataccaaaataataaaattatcaagaccgggcattatcctgtccccggtcttttttctgtgatgacaggctatgttagcctgtcgatttccgatgcttttgaagtatcaacccggtttagtatggctaggtattttttccattccaataagacctggcacattaggtaaatacttattgattaacctaaagagtcagagtagaaaaaggcctgcggtttgtgaacggcgggcctatattatttatactggttgtgcgggccactcaatatctggtgctatggtgggatcaatgcggtttgcttgcattcggtattttttccaggctttgagtcgctctatctcttccagagttgcttcttctagctcaacggtatcctgtaagggagcaatagtattgctggcaagggctaacaattcttctttacgtctttctgcttgagcaactaactcgccctttgtgtacttacgcggaacaatagcgccatttatatattgccattggcctgaaatatcacaagaatcaagcagattacttacttcagccacactcattccctctggattaaaagctgatacatctcctgatatagaacggattacattattaaaatcatacattactttgattgtatcaggattaaagcttttctggcattcataccagtcttgaccgtcttctgatttcaaataaatgacattaaaatcttcaatgatttttctggcttgttctgagtcaggtgtatattgggaaaaatttttaatgttttgcatatattaatcaccttactaaatattggatatattcatccatatgccgttaactttcttctgtatcggcctacggtttacggtgtcaactagctcatttctgtttccatttattacagcagtaatggcatacccacttgcgtttgtatctccagaacttttctgtacttgcgcgctctctttggcaccaaaacgaatatcttgaatataacgcgtgtctgattctgattttgtataagcgccaataatcgcagcggttggtctatatccttcatgatagacttgataccctctaacccgaagattatcagatttaaggctcatccattcattagttggccctccagaaagggcatgctgccatttgaaatattcgttaccattatcccctgttttaaaccacatataggagtctgcatcaccatctccggtgtttttaaaaccgatagaggcaaagtcggtgtttctgttccaactcagcatagaatcagtagtaatagttatgtcacctgttacattgccaccgctgcgttgcaacgcgtctgcggctttagtaacggtttctatcaaaccaaggtttttaaaagctcgccaatccgtgataatttcgataataatagtctcataatggtattaggcagggttacatatggcgaagattggctatattcgggtgtcaataaatgaccagaactgtggtttacagagaaatgcgttgatgtgtataaattatcatctatttttgtagggaaaatctgtgaaaaaataatcaatgaacagaactaaaagttcacgacagaagaaacagatattgatttatagaggtttccttttccactttctataaagtacagatagttgaataattagaaaaaataataaattaagcaacctgatttgtaccatctcccacacatttcccatcgaatgatttaataattcggatacttcaacatagcgggacaccttaacaggagaaccgctaatatggcacaagattatcatcacggcgtccgtgtacaggaaattaacgagggcacgcgtaccatcactacagttagcaccgctattgttggtatggtctgtactggtcctgaagcagacgaaaaaacttttccactaaacactccggtcttgattactgatgtttcactcgccattggcaaagctggtaaaaccggtacattgcctcaggcacttaaagctatttcagaccagtctaaacccgttactgttgttgtccgtgtagcacaaggtgaaacggaaggtgataccaccaccaatatcattggtactacaactagtgaaggtaagaaaaccggtatacaggcactgttggcagcacaaagccaattaggtgtgaagcctcgtattctgggagtccctgggctggatacaaaagctgttgctgttgagttggcgagtatcgcgcagaaactgagagcaatggcttatatcagtgcctatggcagtaagactatctcagaagttatcgaatatcgcaaaaacttcagtcaacgagaactgatgttgatttggcctgatttcctgagttgggatacggtttctaataaagaaactatcgcctacgcgactgctcgtgcattgggtttgcgtgcaaaaattgatgaagaaacaggttggcacaaaacactgtccaacatcggtgtcaatggtgtgaccggtctttcagcagacgtcttctgggatcttcaagatccagcaacagactcaggcctgctaaaccaaaatggtatcacgacacttatccgtaagaacggtttccgtttctggggttcccgtacttgcgctgatgacccattgttccagttcgaaagttacactcgtactgcccaagtattagctgacactatggcggaagcacatatgtgggcaatcgataaaccactgactccttcactggtacgagacattatcgaaggtatcaatgctaagttccgcgaactgaaatctgggggttacattattgacggtcagtgttggtatgacgaaaacgccaatgataaagacaccttgaaagcgggcaaattgaccctcgattacgactatacacctgtaccaccactggaaaacatgatgttacgccagcgtattacagatcgttacctgatggatttcgcgaaaagcataaacggctaaggggacacagatggcattacctcgcaaacttaaattcctgaacttgtttaatgatggcaatagttatcagggaatcgtggaagaaattactctgcctaagctgagtcgtaaactggaaacctatcgtggcggtggtatgaacggtagcgcaaccgtggacttaggcttggatgaaggtgcattggacgttgaatttactctgggaggtatggaagctcaacattatcggcaatggggtctgaccaaagctgatggcgtaatgttgcgctttgcgggctcctgccagcgcgatgataccagcgatgtgattgctgttgaaatcgtgatgcgtggccgtttccatgagtttgaccacggtgcttataagcagggagataatactcagaccaaaatcagcgctaaaaacacctatttcaaattgacatgggatggtgaagttctgatcgaagtggataccgttaacatggttgaagtcgttaatggtgaggatcgcttggcagatcaccgtcgcgctatgggtctttaatctaatcggataaacaaggttgaaccatgacagaaacactaattactcaaaacgacgagcagcgcacaatcgtattagaagaaccgcttgcacgtggtagtagcaacatcactgaagtggtggtgcgcaaaccgaacagtggcgcgctgcgtggtgctcggctacaggctttgctggagatggatgtggattcaatgatattggttttgccacgtgttaccacaccagcgctcactaaaagcgacctgttgtcaatgacacccggcgatctgattaatctcagtgttgaggtggtcaattttttgttaccgaagtcggcgaagtccggtttccagaccgactaaccgtagatgaattggtggcagatattgccaccgttttccactggtctccggcagtgacagatgaaatgtcactaccggaattactggactggcgacatcgggccatcttacgaagtggtgcagaaaatgagtaatacacagtcacagcttaaattggtaatacagtccgttaataagctgaccagcgccttgaaatctgcccagcgaaacaataaaaggttggcagattctctccggcaaaatcgtgatgaatttaagcgattaaatcagacttatgaagcaattaaatcttattctgctcctgaatatgcgcaggaaactgcgcataccagtgacaaaaaggaagaaaatcgcggtgaaggtcgttatagcaaaatcaaagagcttcgtgaccgcgttagtcaatatggtgctagtgcaaaatcagccggtagtaagatactgacaaccagtaaaaactttctgatgcccggttatgatcttaatgttcaaatgtctaaaattcaggcacaaaccaatattgaaaaaaattctcctgaatacgccatgttgcttaaccaaagtcgtgagttgagcaaaagtacagggattccggccagtcagattgcacagggacagagcctgtatgcctccaaggggtattctcctgaccagataaagaatgtgatgcctggtgcggtattaatgtctcaggcaagcggtacagatttcgccaatgtggttgatattagtactaatgtactggaagggtttaaattacaatccgaagagatggggcatgttagtgatgttttgacggcaacgcttattggctcaaaaacaacgttggcgggattgggtgacaccatgaaatctgtcgctccagcggccacttctttggggattgatattgaaaccgttgcggctgctacaagaaagttaagtgatgccaatattaagggaagtgaagctggagaggctttaagcaatgtactaagtcggttggctgaaccgcctaaagctgctgctgccgtattgaaacaactagatattaaaactcgtgatgctaaaggtaatttacggcaattacctgatattctcgttgaactagatgataaaacccgttcaatgagcggtaaacaacgtacgagttatttcaccgcaattggtggtgaaaatgctgctcctgctttggatgtattggtaaatcaggcagggcagggaggattgcaaacttttatcgctgaactaaaacgtgttcaaggcgaatcccaaaaagttgcatctgtagtgacgaataatctcaccggtgatatccaaaaactcaatgccgcttggagtaatctgggcgttcagatgttttctggcgtagaaggtcctgcaagagaagtcactcagcaagtaacaaatgtagtcaataaagtcagtgaatggatggaagccaacccacgcttggctgcaacgcttgcgactattacggtggtggtcggaggcatattaactgtgtttggcgcattggcacaggcgatcgcttcgatattgcttccattagctgtagcgaaatatagtcttactttctttggtagtactggtgtgagggcgctcggattagtcgggaatgctctgaaaatgttgggtagcaccatgatgatcgttggtcgtttgatgatggctaacccaatcctcgccattattggtgtcattgctatggctgctgtttatatttggcaaaactgggaaacattggggccgaaaatttctcagctttgggaaaatattaaaattagcctaagtgagaaatgggaatccattaaacagagtgttctgcaaacctgggaaagtattaaaactaatatcagtaatgcttgggaattagttaagcagaacacgttggatatctgggagaatattaaaatatcgatttcggataaatggaatgaaattattactgacgtaatgaatctgcccagtaaatttaaagaggttggcacagcgatagttaacagtttattggaggggattaatgaaaaatgggaagccctgaaaaataaactgacttcattgtctgagtatctccctgactggatgcggtcaaaggaagatatttcaaaagacgccagtaataatgtgagtcctaatgttagttcggttctgcccaagcatgacaaagggggcattattccggctggccgatttggtattgtgggtgaatatggaccagagattgtcactggccctgtcaatgttattagccgacgacagactgccaaacttgctgccgctgcggcattttctttgagcgtaatggcaccttctgccgcagccagaaccgcaccattgcatgttcagagcttaccggttcatgcttatcctcagattcaggaaaagaaagcagacaaacggcagatggtagagtatcgcagtgaatcaccggtctatcatataaatatctatggtgcaccggggcaatctgcgcaggatattgcagcagcggttaggcgcgaattggatgatcgggaacgtaaacagcaggcgcgtttacgcagttcattctctgatagaggagaattctaattatgatggctgcactgggtttatttgtttttatgttgaagaccacaccataccagagtatgcaacatcagcagtcatggcggcatgcttttaacagccgtatcgggatacggcctgcttggcaatttctggggccgggtaacgacacaatgacactttccggttcgttatatccagaaattaccggtggtcgtttatcattgacggtattacaagtgatggctgatagcggtaaagcttggtcctttatagatggcagtggcacggtttacggtatgtttgtcattgagagtattgaccagacgaaaactgaatttatgtcgaatggttctgcccgcaaaattgatttcacattgacattacggcgagtggatagttctctaggtgaaatgttcggtgatcttcaggaacaattctctatgcttacagacaatttgtcagatagagtcagagaggtattgtcatgacatctgaatttggcagaggttccgaaaaaggcagtgcaccggcatttcttttggaaattgacaataaagatatcagcgggcgcattcaatcgcgcctgatgtcactcacaatgaccgataatcgtggctttgaagctgaccagcttgatattgaactggatgatgcagatggaagtttggtgctaccttccagaggtaatgtaatttcattggcgttaggatggcgtgatcagccactgattagtaaagggcgttttactgtggatgaaattggtcacagtggagcgccggataaattaacaattcgtgcccgtagtgctgatttccgtgaatctctcaatatgagacgtgaagagtcttatcataagaaaacgataggtgatattgtccatactatcgcggcgagaaataaccttaccgccgatttgcatcaggatattgcgaagatatttattaaccatattgatcagacgaatgagtcagatggtagttttcttacgcgcttggcaaggcaggaaggagcaattgcttcagtaaaaaatggtaagttgatatttattcggcaaggacagaataaaacagccagtggtgcggttatccctggattagtgattacacgtcggtctggtgacaatcataattttacgctgtccgatcgtgaggcttataccggcgtggtagcaaactggttggatgtccgtaaaccggagaaaaaacataccttaaccgttgagcgaaaaagtcagaaaaatgctgataaattaacctcttatttagtaggtagcaaagataacgtattggaactttcccgtatttatgctgatgaagccagcgctaaacgtgctgccaaagttgcttgggagaaaatacaacgtggggcagcgacgttttcgattcaactggctcaggggcgtgcagatctctaccctgaaataccaatcaaagttaccggctttaaaccagaaatagatgctgccgaatggacattaacgacagtcactcacacggtgaatggatctgatggtggttttacaacagcactgactctggaattaaaaattgatgatctcgatatgaaataaatgttcttcaaatgagatctcattgctatattgttcacattatgagagttcatgttttagttaagggtaagaaaatatgatcaagtgtcctctttgtggtaaagcggctcatgcacgcagcagctttgagcattcctgccatacaaaagaacgttataatcaatgtcaaaacatcaattgtggtgcaactttcgtcagccatgaaacgtttgtccgctttatttccaaacctggtgaagtaataagtgttaagccgcatcccaaagaaaaaactaaaactcaattgaatgtgacttgaaaattaaaagttaattgtaaatatttgccaccaaaaaaacaggtggctttttactcggatgctcgatttgttatatatctttctgctagctacgttgctaaatatcttgtgaattagttaataaattcacttgcgtccctagtcatattttgtcagctttggtgtaatcagaatcactgatcaacacttaccaaagtaggacaataatgatgaaaaatgtgggctttatcggctggcgcggtatggtcggctcagtattaatgcagcgtatgattgaagagcaggattttgatgttatttgtccggtattcttcacgacatcacaacacggacagccagcacctgattttactggtcagcaaggtacgttacagaatgctttcgatatcgaagctcttggtgctttggatattattattagctgtcaagggggagattatactaatgagatttatccaaagttaagggcaacgggttggcagggatattggattgatgcagcgtcagcgctgcgtatgaatgatgattccatcattattttagatccagttaaccatacgcatattcagcaaggtcttaataaaggcataaaaacttttgttggtggtaattgtaccgttagcctaatgttgatgtctttagggggcttatttgctaatgatttggttgaatgggcttctgttgcaacttatcaggcagcttctggtgcaggtgctcgtcatatgcgggaactactggttcagatgggatctctacatactcaggtagcaaaagagttgcaagatccggcatcggctattctggatattgaaagaaaagtaacggatttcacccgtagcggagttatgtcaactgagaaatttagcgtgccgttggcaggtagtttgattccgtggattgataaacagcttgataatggccaaagccgtgaagagtggaaaggtcaggcagaaaccaacaagatcctgaataccggtaataacatcattactgtggatggtttgtgtgtacgtattggggcgctgcgttgccacagccaggcatttactttgaaattgaaaaaagatatttcgattcctgaaattgagcaattactggctgcgcataacgactgggttcgtgttattccaaatgatcgcgaattgagtatgcgtgaattaactccggcggcggtaacgggaactttggatactcctgtagggcgtttacgtaagctgaatatgggaccagagtatttatctgcttttactgtcggtgaccaattgctgtggggagcagcagagcctctgcgtcgtatgctacgtatcttgatttaataattttaatctatctatttatgtgaaaatccactcgttattcgagtggatttatctatatagctctgttcattgtttctttattggtttttttttgttatgttacataagttatgttaatggttttgtgatttgaaaataagaaatcggttttataaggggagatatgaagcaagataacctactggatttaaaggtaagggaattaagagagttagcgaaaactttatcttttcgctatctaactcatagtaaaataagaatggattttaattcaaaaataaatctttttgtagaggatatattaggtcaggttcgtattcactgtttatcttcaaatggtgcaattgagattattcagtttgaaatagatcacttaaaagaacaagctttctgtttgacagcaaacagagtaaagcaatatgcaataattgaaagggaaaaagagaaatcaagttatactaatcttatattaaaacagatcgggtttgttggtggcggcactcaaattcttgcaggttatacagtctgtaaagcttctttagggttagcatgtgcctcattcggtgcgccattaatggcccatgggtataataatgttgttgaaaatggatattatctactgtacagagaaaatattaatggtggtgtcagagaaggatataggtatgttgctaataaaattggtttaagtgataaagatgcagatattacttatgcaactgttgatttagtgctttcaggttatggcatttttagaaaagttttgaagccaagagagaaatcttggagtttatttagaaatattaatagtgattttatcagaggatggagagaaatgggagttgtgagcttaactacagaaggtattgttgatgtttctacagttttgagtatttatcagctagaaaaggaaaaataatgatggattatattgatgttacaatttccactcaatctacttggcaggatatttttctgtactattctttatcattgattgttttgttttttcttttttttatgaaaattttcatagaaaaaaaaagaagttatatactctctgtttttggtttctttataatagtaatgtttggttcaattcaattgtttattgttaaatatgatggttatcatgaaattatatcaatgtttattaatttaaatagtgaagtaattagagtgggtagtgtgatattttctgttttatatgcgtgcatgttaccaagaaaatatggggattaatttaaaattaaatggttgtaaaattaacttatcaatgggtagagtaagttttaagttaatgtttaattattgaaaacatagtatgctatattaaataaggtttcataattccgatatatatgattttcttcaactaattgttatacatagaattatatgttatgtaacgtttagtactattttggaaagttatttagtgttcaattgattttgacaggatatgagtacaatatacctaattttattaattttaaaaatgaaagtataaaggttggtggttttatattttccttattgtatattattttaatgccaagaagatattctaggtgattttttcaaagatataataaaatgtcagaattaatttagttactggactaattgttgataacgctacagctctgagtatttgtcagctagaaaaggaaaaataatgatggactatatagatgttacaatttccattcaatctaattggcaggatatttttctgtactattctttatcattgattattttattttttcttttttttatgaaaatttccatagaaaaaaaagaagttatgtactctctgtttttggtttctttataatagtaatgtttggttcaattcaattgtttattgttaaatatgatggttaccatgatattatatcaatgtttattaatttaaatagtgaagtaatcagaataggtagtgtgatattttctgttttatatgctttggctctaccaagaaaattcgttaatgaaaaaaggcgttaaattaaaacgccttgttttgattatttaataaattctgtcatcccaaatactataaccgccagtacctgcgataaggtgattccaggtaatattggtatattttaacgaaatactttcctgtggtggaagctcattatgattcaatgaatgtggatgtaagacacttatttcagtgattgtggcaccagtgatctttatattgtaataacgttcttgagcaccatttgaattagttcggtaaaaatcaatagagcattcaagagactcattctcagaaatagcaacaccgagtaatggtgatgatttgtcgataggtttttggataataatgggttgatgatcgacattttgagtccgtgttatcgcatggcttaagctataaactaatatctgatcaaagtggtttgcttgatatttattaccaatggaatcaacagaagaacatccagccgatattaatccttgtttttttccctttattgtcatgtaaatcatgtcagccatattatacccttagattatatttaagtgatgttttacagaaacattaaataaattacactttattggttataaataacagataaaaaaagcgctcatagagaatcaatatgagcgcttttttaaatttataataatatcaactagatatcaatattagctgctttcagggcattctcttcaataaatgctcgacgaggttcaacagcatcacccatcagagttgtaaacagttggtcagttgcaatggcatcttttactgtcacacgcatcatgcggcgagtttccgggttcatggttgtttcccataactgttcagggttcatttctcccaaacctttataacgctgtatagacaacccacggcgagactctttagtcaaccagtttagcgcttgttcaaaactgctaaccggttggcgtcgttcaccacgttcgatgtacgcgtcttcttcgatcaagttgcgaagcttatcacctagtagagtgatgcggtgatattcaccgccgtggacaaaatcgaagtccaatagataatcagtatcaacaccgtgtgtacgaacacacagaaccggttcgtacatttggcgctcacgattttcatggaggcgataactgtagctgctgccgttttgttcactgtcattcaaacgggtgaccagcatttcaatccattcttcaactttcgccttatcagacaatgtttcttcggtcagattcggatgataaattaggctattcaataaacttagcggatacaaacgttccatgcgtttaatgattttttgaacaccattaaattcggtcactaatttttctagcggttcgcctctcagggctggtacgtgctcattggtgtaaagtgaggcaccatctagtgcaatggatagttggtactcatccattgcttcatcatctttaatatattgttcttgtttgccttttttgactttatacagtggcggctgagcaataaacacatgaccacgttcaatgatttctggcatttgacgatagaagaaagtcagcaagagagtacgaatatgagaaccatcgacatccgcatccgtcatgataataatgctgtgataacgcagcttatctgggttatattcgtcacggccaataccgcagcccaatgcggtgatcagggttgccacttcctgagaagagagcattttatcgaaacgcgctttttcgacattcaggattttgccttttagcggcaaaattgcctgatttttgcggttacggccctgttttgccgaaccacccgcagagtccccttccactaagtagagttcagagagtgccggatcacgttcctggcaatccgccagtttgcctggcaacccagccagatcaagagcgcctttacgacgtgtcatttcacgcgctttacgggctgcttcacgagcacgggcagcatcaataattttactgacgacagttttagcgtcgtttggattttctaataagtattccactagcttctcattcatcagcgtttcaaccgcagttttcacttcggaagagaccagtttgtctttagtctgagaagagaattttggatcaggtactttaacggaaataacagcaactaaaccttcacgagcatcatcaccagtggcgctgactttggatttcttgttgtacccttctttatccatgtaactattaagagtacgtgtcatcgcagtacggaagccaactaagtgagttcccccatcgcgttgtgggatattattggtaaagcaataaatattttcctggaaaccatcgttccattgcattgagatttcaacaccgatgccatctttttctgtagaaaaatagaaaacatttggatgaatgggagttttgtttttatttaggaactcaacaaacgctttaattccaccttcataatggaagtggtcttctatattagtgcgcttatcaatgaggcggatggatacaccggaattcaggaaggatagttcacgcaggcgtttagccagaatgtcgtgctggaattctgtgttatcacggaaagtatccatgctcggccagaaacggacacgggtacctgtctgttcagtttctccaacgactttcagtgggctttgtggcacaccaaggtgataagtctgttcatgaactttgccgtcacggcggataaccaattccagcttttcagacaaggcgttaacaacagaaacccctacgccgtgcagaccgccggagactttataagagttatcatcgaatttaccccccgcatgcagcaccgtcataataacttcggctgctgaaacaccttcttcttcgtgtataccggtaggaataccacggccatcatcctgtacggagactgagttatcagcatggatagtgacgataacttcactacagtggcctgcgagggcttcgtcgatagcgttgtcgacaacctcgaagaccatgtggtgtaagccggtaccatcgtctgtatcaccgatatacatgcccggacgtttacgcaccgcatccagcccttttaataccttgatacttgaggagtcatatgtattcgacatcaacgtttctcgctcatttttaatcctgtggttgaacctctattttgccattttccacgcgaaacatcttgctatttccatcaagcatgtctgttatttggtcaggatttatcgcgctgacaaatacctgagcttgcgtggattttagacgagcggccagcaactgacggcggctggtatccagttcggaggcaaaatcatcaagcagatacagacattgttgtccgctctgtcgggtgaaatattcaccctgtgctagccgcagtgcgcacatcagtaactttaattgaccgcgggatagcatatcttctactggcgttccttctgcacgaatgcgcagatctgccttatgtgggccggaagctgtataggttaacgttctgtcacgctcaaattggcgctccagtaattcagcataatcactctctttgtcccatccctgttgaaaagagaaacttaatgtaaattcgggtaagaactgcttacaggtattcgtgatatcctgagtgatgtttgtaacatattcaccacgccactgatttatttggttagcgagtggtatcaattcctgatcccaaggccgtatctggctgtagcgggtaacttgccgtagtgctgcattgcgttgtttgagtagccgttttaagtttacccatgcagaaaaaaagcgtggctcattgtgaaagcacccccagtcaataaaagcccgtcgatactttggcccgccatttaacagggtaaacccttctggagtaataagctgcataggtaacatcttagccagttctgcaattttaccgccatcactaccatcaattctgactttactgtcgccattacggtttttactcaggccgatagaccgttcccgctcattctcctgttgccctagccgcccatgcagaacgaactcatcgcagccatgaaggattacccgtcctgcctgaatgctacgaaaagagcgcccgtgacccagcgtataaatcgcttccagtacgctggttttaccgctgccattagagccaaccagaaagttaaatccggtagctagaggcaaatcagcggcggcgatattacgaaaatcgcggataagtaaacgcgtgagagtcatatacctgaaataaaaatccggttacaggcgcattggcatcacgacataagccgcattgtggtttgcacagtcttctatctgaacactagaaatagcatcagtcagtagtaaacggacctcttcacatcttagtgtattgagaacatctagtacgtaactgacattaaagcctatttccatttcagccccttggtagctgacatcgacaatctcttcggcttcttcctgttcagggttatttgctgtgattcttagctggttttcactgaaataaaggcgaactccgcgaaatttctcattagagagaatagctgcacgtgaaaaagcctgtttcagcatatcgcaattagcttccagagttttatctgggttctttggtaatacacgacgataatcagggaaacgtccatccaccaatttagaggtgaaaataaagtcgccaacgtgggcacgaatattgttactaccgatttgtaactgtagcggagtatcaccaccatccagcaatctcatgagttcaataacgcctttacgtggcacgatgactgaatgggaaggcaatttttgaccaattcccatagaacagactgccagacggtgaccatcggttgcaactgtacgtagctcttctccttcggtttcaaacaacataccgttgaggtaatagcggacatcctggtgagccattgagaactgagttgattcaataaggcgcttcagtgtggcctgaggcagtgaaaactccacctcactttgccagtcatcaagatttggaaaatcagatgcgggcaatgtggaaagtgagaagcggctgcgaccagaacgcaccaataggcggtcaccatccagttctacactgatctcggccccgtctggcaaacctcgccagatatcaaagaatttacgtgccggtactgtggttgcacctacttcgtgtggcaatgaaagcgtgactcttgccatcatttccatttctaaatctgtgccggtcagcaacagggagccttctgtaacctgtagtaataaattaccaagaataggcagagtagggcgcccactcagcgggctactgacctgttgcagtggttttaacaattgctcacgttcaatgataaatttcatagcactaggaagacaatgttctgattaagttagaaaaatcctctttgatgtcgtgactttcttcacgcagttgctcgattttacgacaagcatgcagcacagttgtatggtcacgtccaccaaaggcatccccgatttcaggcaagctgtggttggttaactcttttgccagcgccattgccatttgccttggacgggcaacggaacgggagcgccgtttggaaagtaaatcggccaccttaattttataatactcagcgactgttttctgaatattatcaatggtaaccagtttttcttgcaatgctaacagatcacgtaatgcttcacgtacaaaatcaatggtaatcgctcggccagtaaaattggcatttgctattaccctatttaatgccccttcaagctcacggacattagaacgcagacgtttggctataaagaaagcgacttctcctggtaactggatttcgttttcgtctgccttcttcatcaaaatagcgacacgggtttcgagttccggtggttcaattgcaacggttagtccccagccaaaacgggattttaaccgatcttctaccccattgatctcttttgggtagcgatctgatgtcagaataatctgttgattaccttccagtaatgcattgaatgtgtggaagaactcttcttgcgagcgttctttattggcaaaaaactgaatatcatcgatcaataatgcgtcgacagagcggtaatagcgtttgaactcttctattgcattattttgtaatgccttgaccatatcctgaacaaaacgttcagaatgcatatagaccaccttggcatttgccttacgtgccataatactgttacctacggcatgtaatagatgggttttacccaaaccggtaccaccataaagaaatagtgggttataggcaccgccgggattatcagcgacctgtcttgcagcagcacgagcgagttggttggatttaccttcaacaaagttatcaaaagtatgttttgggttaacattagagcgataagagagctcgggttgtaccgcggtgttatcccaactggggcgtactgatgtgttttgtggtgcaggtgcaaccggcgtatgagtaacaaccctttgtggtgggctatcgttttgggaaacgggtttattgccaacttcaaaacgtaataatggtacttctgctccacagaagtcattcaacaatccattgatattgttgatatacttctctcttacccagtccagaacgaaccgatttggggcataaagtgccagcgtgttaccacttagctctgcctgaagggggcgtatccacatactgaattctgtggcaggtaattcatcctgcaatcgggcaagacattgctgccaaagcgaaagtgacacggtggactcccctaaaacaaggccaattaacaattaaagaaatcggagtggttagctcattatgttgggtacaaaacaacgactcctctaaggtgaggaaggatcaattgtcatgtgtatggcgatttttaatgtcatcgctcccccatgatccgaggataagatccaaatcatggcttgggatcatagcgcaaaagacgatatagatcttcattcttttacacagtttaagcgctttttatccacaggataaaattgtgtgtgaaataaagagctgtaaaggggttgtagtggaattatggaggatgccaaatgcagatcgagaataagccggtattcaaaataaaatcggaccaaggatcataacaaaaaacgaagatctgccagtgatcgttgcgctttgttcagtagtccgtataatattgcaccctatgtgcgtatcagagtttttaccgataatgtttggtgaagggtctggtgtacgcatgggcagagtgttggtaaacatccgactcagtagaaaagccggccgactttgtgttatgtaaattgactcagagctgtacattttattacaatcccgcttcttttatattgatgttgcgattgaggcatcggtgtctatttctcactggctgccaacgcatttactgaatcagtaataatcttaagttaggtagaaatcgctatgaaacgcactttccaaccatccgtactgaagcgtaaccgttctcatggtttccgcgctcgtatggctaccaaaaatggtcgtcaggttctggctcgccgtcgtgcaaaaggccgtactcgtctgaccgtttctaagtaataaagctaaccatctagtggttaagctcgcttttccgagggagttacgcttgttaactcccaagcatttcacttatgttttccagcaaccccaacgggcaagttcgccagagattactatccttggtcgcccgaacgagctggggcatccccgtatcggtcttactatagccaagaaaaatgttaaacgtgctcatgagcgtaaccggattaagcggttagcccgtgaaagcttccgtttaaaccaacatgagttgcctcctatggattttgtggtattggttaggaaaggcgttgctgagcttgataaccgtgcgttaacggaggcgttgggtaaattatggcgtcgtcactgtcgtttggctcgcgcttcctgatcgcattaatccggggatatcagttggtaataagcccgctgttggggcctcgttgtcgctttaatcctacatgctctcaatatggcattgaggcattacgcaggtttggggtgataaaaggctgttggttaacggtgaaacgcgttttaaaatgccaccctttacatgaaggtggtgatgatcctgtcccacccgtaaaaaacaacgataacagagaacactaacgatggattcgcaacgtaatcttcttctcatcgctttgctgttcgtttctttcttggtctggcaagcatgggaagcagataaaaatccgcagccaacgacagtacaggccacgcaacaaacggatatgccgagcagtgagaatcaagctgtaccaggcagtggaaaaggtaaacttatcacggttaaaactgatgtgctctctttgaccatcaatactcgtggcggtgatatcgaagaggctgacctgttagcctatcctgataccttgggttcaaaccagcccttcaagttgttggaaacaacacccgctttcacttatcaagcgcaaagcggattgacggggaaagatggtccagataacccgatgaatagtgagcgcccgctgtataccgcagcacaggatagctatgtattggctgatggacaggatgaattgcgtatcccaatgaatttcgtcactaaaaatggcattgtttacgttaaaacatttgtcctgaaacgtggtgaatacgcgattagtgtggattaccgtattcataacacgacagaaaaaccgttacagatgaccttctttggtcagttgaaacagagtgttgaactacccaagcatcgtgatacaggcagcagtaactttgccctgcatacttaccgtggtgcagcctattcttcagatgataccaaatacaaaaaatatagctttagcgatattgaaggtgaatctttatccgtgaccaccaaaggtggctggattgctatgttgcaacaatattttgctactgcttgggttcctgtagctaatgaaaccagcactttttacactgttgcattaggtaaagagatggctgcgattggctataagagtgccccaatctctgttgcggctaacagtgaaaaaacagtctcttctacactgtggattggtccagaaattcaagatgaaatggctgctgtagcacctcatctggatctgtccgtagactatggttggttgtggtttatctctcagccattatttaagctgttgaagttcctgcatggttttattggtaactggggcttctccatcattgttatcacctttattgtgcgtggtatcatgtacccgctgaccaaagcacaatacacgtcaatggcgaaaatgcgtctgttacagcctaaattggcggctatgcgcgagcgtattggtgatgataaacagcgtatgagccaggaaatgatggcattgtacaaagcagagaaagtgaacccactgggtggttgtttgcctctgttgatccagatgccaatcttccttgctttatattacatgttgatgggttctgttgaattgcgtcatgcgccatttgctggctggattcatgacttgtctgcacaagatccttattacatcctgccgttgctgatgggtgtgacaatgttcatcatccagaaaatgtctccgacaacaattactgatccgatgcaacagaagattatgacctatatgcccgtcatatttaccatattcttcctgtggttcccatcaggtctggttctgtactatatcgtcagtaacctggtgacaattatccagcagcaattaatttatcgtgggctggaaaaacgcggcttgcatagtcgtgagaaaaagccagcgaaataaaacatacaccctatggatttcaagatggatcgcggcggcaagggagcgaatccccgggagcatagaaaactatgtgaccggggtgagtgagtgcagccaacaaagaggcaacttgaaagatgacgggtatagcttcagccagaatgaatatatgctggccgttgtaacagaaaaggcggtcattgaccgccttaactatttgagtaaaagaataatttgggcgaaaaagtcaatagagagataactatgaataccacggatacgattgttgctcaggctaccccaccaggacgaggaggggttggtattttgcgtgtttccggcccgaaagccgcacaggtcgctgaggtggtattaggtaaattacccaaaccccgttatgcagattatctgccatttcgtgatgtggatggtcagatacttgatcaggggattgctatttactttccggggccgaattcctttactggagaagatgtactggagcttcaagggcatggtggtccagttattctcgatttgctacttaaacgtattctaacgctgtctggtgtgcgaattgctaacccaggtgagttttctgaacgcgcttttcttaatgacaaactggatttagctcaggcggaagccattgctgacctgatcgatgccagttcggagcaggctgcccgttcagcgatgaactccttacagggcgctttttcgactcaagttcaccagatggtggaagcacttactcacttacgaatctatgtagaagcggctattgattttccagatgaagagattgacttcctttctgatgggaaaatcgaagctaagttggatgaagtgatagttgagcttgagcgagtgcgttctcaggcacgtcagggcagccttttacgtgaagggatgaaagttgttattgctggtcgccctaatgcaggaaagtccagtctacttaatgcattagcaggccgtgaagcggcgattgtgacggatattgctggtacaacccgtgatgtgctgcgtgaacatatccatattgacggtatgccgttgcatattattgataccgccggtttgcgtgaagccagtgacgaagttgagcgtattggtattgagcgtgcttggcaggaaattgagcaggctgatcgtgtactgtttatggtggatagcacgacgacgaacgcggttgaacctgtggaaatctggcctgaatttatggctcgcctgcctaaatcgcttcctatcacagtcgttcgtaataagacagatatgactgatgaagagacaagtattgcagaagtaagtggttactcgctaattcgactttctgcccgtagtggtgaaggaatcgatttattgcgtgatcatctgaaagagacgatgggttttagcagtaataccgaaggtggtttcttggctcgtcgtcgtcatttacaagcattaaataccgcagcggaacatttacaacagggccatgaacaattggtggttgcccgttcaggtgaattgctggcagaagagttgcgtctggcgcagcaggcattgagtgagatcacgggtgaatttacctccgatgatctgctaggaaggattttttcgagtttttgtattgggaagtgaagtggtcatttttaaagtgtaacgcttcaaaacccatcgaaacatatcaaactgttatatataaacttttacatatataacagtgctttcttttttacttcgctttgatccgctttaccaaaactccatcgcgcattgcaaagtcgttttccgattacttttaaaaaaatggtgctgttttaaaagcgccaaatacagtgtggtatacgctgttccaacagctacaacatctgttaccggaacaagattgtttttaaatgatcgtctgccaaatcaaactcaggatctttacctgttaacgctttcgttagtggcataattttggtcctcacacccattcctcggtaatcgacatagccataatcacgcaatacttccataacaatgatatttctgggtgaacgctgtcctgctttcattttttctaccgtcatggagtttggtaacgaacctgggctaattacttcaagccggtcggaataactagatacctcaatttcaacaaaacgtgtccaatcgcggtgcgccagtgcattgaccaatgcttctctaacggcctcaagtggataaaaccaccgtgtctctcgccttaactcttcattcacctgatcagactcttgagaaataaagggactcatagcctcgataaatctctcaataacgccgccatcgactagccgtttatcaccattttcaagatcccagcgcccgaccattgggccatcaatgatgtcatccaatgcagcttggtattccttatcttcaccatgaaataccatgacccgtaaacctgcttgtttgagatagcgtctcgggcttttaccaaataacaccaagccagctattgtgcagcaaacactgcctgcggcttcggttaaaaaacccagtccaagtagccttgcttgccattcatcaggtgttttaggtacatcgggatctcgtaagatgtcctttacataattggttaggcgagcgtcatccaaacaactcatatctgtacgaggcacaggcattacttcggtatgcagcattccacccaattcgaacaatcgcatctgctgctctctagttgctagcctcgatgttgtcccaacacgaatatagatttcctcttttccgctatggagaacgacgtagggcttcgaaatgccgatgggaaaactaatgacagcaaccagtttaccatcatccaatttcacttcttcgtaaaacggcagcatcatcggatgaattttgccctgaaagacattcataacccactcttcaagatcatgcctttgtacgccactaatagtaccgtcatcttccacacccagcagtacccgtcccccttggaagttggccatagcaacaacttctttggctaactgctcaggacgtatatcatctcgcttaaactccacacctgaattttcgccattggcaataatttccaacaattctgtttttaacatcgttctctcccaaggaagtaaagcattcagttaaagccgtacttttcacgacgttgattaaacgcactcttaccaccttccaatatatctgccgctagtttttgcacttcgggcatatcgatcgcaccctgctgttctggccggatcaaccctttgttatcttccacactcagcacaccaatccattccgcgtcgccaaataccggaatattggcgttgtgggttgcgaacaagaactgtcggcttagcttggctctgcgcagctcagcaacgatacgctcagcaataaaggcgttatcaaggttatcctccggctgatcaaggataagaggatcttggttgtccaatagcaacaggtgcaaaatcgccgtacattgttggccggtcgatagttccccaattgggcggaaaacggcctcgcgttcaccgtgagtgatattcagctcaatcgccattgtatcgggaagcagcaactcttctagctcaagcagtttacgcttaggcaaacggcttaacgctcgtacaacggaattagatataccgaaattagaggttaattcagcctcaccttggcgaatagtggcagcaagattagcgggtgtgaactcactctctaaaacccacgctagtctttcctgcccaataccctctaaattgcaatcactcaggaaattcactaattcttggcggttaccttcagaattcagactaaggcgtaccttttgatccaacttgcgagtgagccgtttaaccgaattctgcatggcgctagcacgtgcactggtctgctgatctaactcaagcaatagtttcttccgctgactatagagctcgttgagttgggtttgtcggttttgcaaggcagtttcttttgggcggatctgttcaatttgctttagtaaggtttgatattcagcaccaatctgccgacctgttttaccctgacttgcaggtatgtctttaaacgcattttcaagttgttgttcttccgctcgcaacctttccgacagttgttgctgtagaggaagtaaatcaccagaggctttactggagagctcttcaacccggattaaacattgagttaaagagttctttaacatttccaaaacttgacgcttttgttttaaaagatttgagtgtggtaatccttctaagctggcatcgcttaaaaataccgtatctggcaaactgtcttttaagatgttgatagcttcttttattcgagtaatttcttcattaactctctcattcagttgtttttctttttccagcgttggaatcactttcaacttttcatcaatacccagcgcctggaattgtttagcctgatccaataacttgggtaagcgctcaacttctgcctcaacatctgctttttggctaagcgcacgaataatggtttcacgattatccttaaggctttctagcacttcggttatggccttatcaaactgctcgtgctcactttccaagaatcgtttaataagtaggtttcggctttgttcatcccgagtcatttcataaatttcattctgaccgtacagctcaacgccaggcagtaaatctttggggtgataaggtgaaattctgccgttttcattctccaccactactggctggtttccatatttgcggctcaccgtaaatatgcggccatgcatggttgcagagcgaactcttacttcaaccatacctttttcgagacctaagttattttttacaatagcgtcatgctgagctttcgatgctttaccaaaaggttctaaatcaaaagcatagcgaatacactccagcagggttgatttgcccgtacctctaccaccaatcaccgcgtttaagtgatccgataattcaatatccataccatcaagatagccaccgacaaaacgaacacgttcgatagctgacgcatagttttccgatttgtctgaatttagccgcactctggagccagcatctaaaaaagcttgcttgaaagaagtgaaacagggcttggtcattttaattaaacaagaagcgccatcagctttaatctcttcaggcttcgccacatcagcggcattgatggcagccatttcccgtttgcggcgatagttatcatctttatttaggaaaactttacgataaaagtcgctctctacaccctttaagtcctcaactgaacctgggatctgagcagccaacagccctttatgttgccaaatatgattcatccgccgttttaacacgccatcatcattagtacagtgggccgcgaaaatgaaaccacccttatcgtttacgtaattaataatatctgtggcagatttctgcactggggcttccggctggtttatatccacatctaatgctcccaaatgcatttttatctgatcagctgactctgattcatcaaacaagcaaacgaagtgaattttctcactggaagcaacttcaaagcaggggaacaccacgattccatgttgtgtaaagagatctctgatcttttcaaaaccattcactgacccatgatcagctaggccgatgacttcaattctcatctctagcgcagcatttaacaattgctggttatagtcatcttcagaaagcgcctgttgctgcccccgatattttatgtagcctgaagcatttacctgcaatgcacacttgaaaaaacgagctttagcgtacttattggtctgaatagtcatacttatactccacttatacaggcatattcatcgttcaggtcttggtaatttacatcgataaaattgtcttaaagcagatctgtattaagtcctgcggttttcaaacgctgcgtcaaattgcgcattttactgaattcagtgccaaaactctgggtaagcccaacaccttcacaaaagtctttagctgtaatgttcttcagctcatcggcatacttaatcatttgtagatgtagctcagctgtgtactgattgcgtggcgcattcgctaaaacctgcttgatcctttcgtaaatatcttgttcgtttatcataacctttaccatcgaacatctagataatttagctaaattatataatttatatgcgtacagcaaggaaaactgtagttgcgttggtaaacgttctagactatttgcaaatagatgggggatggtttgctttactgatagcaagctatgagataatgctaccatttagttacaaaatcaaaattcacataagaaattgttttaattatatttttcacattctgtattggcaagtgaatgggtaaaaggcagaagtggaactttttaccggttataacaggtaaaattatatttaccgtctatagcgtgtaaaaattgatttacctgtcatagcgtgtaacaatgaggttaactgttcaaattggttgacctcaatatgaaagtgactaactcgaaacaacttagcgtatatttaaaagatatcaggcttactcaaaaactttctcagggcaaagtggcaagcaaagtgggtattcggcaggacacggtatcaagctttgagctgcacccagattctaccaagctggagaccttctttaagattatgtcggcgttgaatttagaactcgatatccggccaagaaacgtgactaagataaattcgtcagtggaagatgattgcacaacgtcggacccggcgtggaaagaggagtggtaatggcagcactggatgtctacatgaacggttatcgggttggagtattcaccaaagccaatactggcttccaccatttcaaatatgatgagtcctggcttaggttatcgggtagtcgtcccatttcactgtctatgcctctgcgccatcaagcttatcagggggacgaggtatataactttttcgataatctactgccggataatccggaaatcagaagaagaattgttgccaggcacaatgctgaatcaacgcaaccttttgatctgctggctaaagttggccaagatagtgtaggtgctttgcaattggtaccgcaaggtacatccgctaatgatatcaagaggattgaatacaagcccttatccaaggtggaactagagaaagtgctaactggctaccaagctggtgcgccattggggatgatcgaagaagaggaagattttcgtatatccattgctggcgcacaggaaaagacagcgcttttaaatattgatggaaattggtgtttgccattaaatgccacgccgacaacacacatcattaaacttcccattggtaaaattgagagtcattcacattccattgatatgtctgaaagtgtggaaaatgaatatctgtgcatgttgattgccaggatgtttgggctgtctgttcctcactgcttaataatgaaagtgggagagataaaagcattagcggtagaacgatttgatcgcaagtactcatctgacaacagttggataatgcggctgcctcaggaagatttctgccaaaccttgagcgtgccttcggcgaaaaagtatgagagtcatggtggccctgggattcccgagatcatgtcctgcctcttgggttcggttaaagccgagactgaccgttatgaatttatgaagatccaggtattattttggctgttggccgccacagacggccatgcaaaaaacttttcgctgtttattgaggctgatgggcattatcggctaacgcctttttatgacattctttccatgtaccctgtattcggaggcagagggcttcatccccgagatgccaaattggcaatggggctaactgggacgagaggtaggaagtacaacatagagcagatattcccaaggcacttttttcaaacagccaaggtcgctggatttgataaggattcgatggcaagaattcttactgaatatgctgagacggttgataccgttgtcatgaatgtcagagaccagttgccgatagatttccctgttcatatcagtaattcgatattgggagggttacaagccagagcaaagcgcctgaaaattgggtgggattaacattctcatcaacattatctacagcaagcgccatataaatatggcacctactcacattatgggtatatataccctatggatttcgagatgcatcgcgacggcaagggagcggatccccgggagcataggtaactatgtgaccggggtgagtgagtgcagccaacaaagaggcaacttgaaagataacgggtataacttactttttacctgcaacgtctagttgctgataaatatagtgtttataactctccaccagcgccttatcctgacaatcatccaacgctcctcggcagagatgacgcattgtcatatttgctcggtaaaaagatgaagcatccagtttagccctctccataatcatgccgccaaggaatgaaatatccgtcagttcatcagtctgaatagattctccctgttgcaagttatcccgcatagtaaactgggtaatatgacccggatttgaaaatacgccattgtactgatttaggctgatattgggttgatgatcaccgaagtagaggaacatggttggcttttcccgtttagcaacaaactcactgaaatctttaattgccggatcagaagctttgattttctccatatagtgactgaacttacctactgcctgtgaatttttcacatgtccggtaagcctgtaatcatcagcgtgatcttcatcatatgggccatgttcatacatagttagtgagaaaataaagagcggcttatccgtttcctgtgccaaaatttctttcacataacccaacatctcttgggtagaaatagtccacagatttttatcaagactggcgggatatcccaattcttgtggctgaataatgcgatcaacgccgagagtctgataggcatgaccggaatgataagaagatttattaaatggtgtcaaaacaaccgtataataaccattctgtttcatttcacggaacaagctatatttcaggtgatcaacaataaaataaaaaaccgcattcttacgtgagccaaaatcatctgtatttaagcccgtcagagcagaaaattcagataaccaagtaccaccaccgaaagtttgcacccgcattggactttgggcgctgacacccgaatcccgctggaacatataaagatgaggtaagcgggtatcatcaggcagttgatagatatgcggagtcacggtggattcctgtaataacatcaccacgtcaggtttaatcgctgactgcgggacaggcagcacaacattcttagcctgttgcagaaaataatcggatgattgcccaaactgaggcgcatgatatttggcatctttggccgacatcaccatattggtgactgtaccacgtccttttggtagtgaagattcccactgttccctgaacgcatcggcggtagcgctcacttcccatgtacagaacgccgccagaaccaagccgacggtacgccatttgaaaccacggagggaagatgattttttccagctcagcgtcatgttaaaaatcaaccagataaacatcgcgacaacgcctaaaccggccagccaatagtggcgtagtgtttcctgattggcaggatcaaacatcaagtttagatcggagaacatcaactgctctttgtagtaatgaacttttatctgattgaggaacttaaagataataaacagtgttccggtaaaggccgtagaaaacagtaaccgagctgacgcaaaaaatactagaccaaatatcacaccaaacatgccgacagcaatcagtgccgggtaaatatcttcacttttttcaaaaactagtattaaagttgcaatgaacaataatcccagataaacacctgatattattttctttttcatatcgtattgaatccaattaataggtggttcacggttggcaaaatagcacagatcagttcaagacggtgattttgctgaaatcatctatattttaaataaagaaatcatcagaacagcccattatctctaagaatatgtgactcagcctgacgacgagtaaaaccactgcgatcaaaaaattccaatatctgaatagccagtttacgaccgataccgagttgatcacgaaaatcggcagcggtaattgcaccatgatcttgattaaattgacgaatcagatcggcgaactgctgaattcgttggctgcaataataacgatcaggaacaatcgcgataatatgccccaattgagcagcttttttcaacaaactgcgaactgttgcttcttcttcttttaaatcagcagtcaggtcgcgtacccaccaaggatcatctgtaaaatagggcgctattcgttgccacaattttgcctgttcatcactaaaagacaaaccgtgttcaggaagatataaccaacctcgtaattgctttagctgtccatcactgagcaaggcatctatcaaagtgtaaactagcgcttcatccagcgttggcagcgccatccgtttcagacgtgccctgcctaaacccagttgatcaacatgttgctggtgatattcagccaaaacgtgtagtaacttctgctttgctaacttggcattgttctgtgataacaccataccatcggcaataatcatatcttgatcaacgattagcgggtggagagttgcttccgttaactgacgcgcccaagaaaaatggtcgagagagagtgcacctcgtggcaaatggagcgctaaattagctgcatgatctgatgttctggcaagctgagtgagccaatgcaaaaatgctggttggcgcttaccacggcggggggaatttaggtttattacccgcgtaccagccaatgtttttctggcactaatatctcgcaatatcagtcgatcatcctcaaccaaccacaatgggctatcaagcaccaattcagccagcagaggcttatcagaaagcggatttagtaatgaaatccgccccgttatatggctggcagcatgatgaatatgaagtgattgccagtttcgcaagggttcatcagtttctacttccaccaatactttctctacgtgttcaaagggctggcgggaaagtagccaatcaccacgggaaacctgttctttactcacatcaccagcaatattcagtgcaatacgttgcccggcctgagccgtatcggcctgttgattctgagcatgcaagccacgtactctaatttgctgatcccggccggttagccagagggtatctcccaccctgacccggccagccagtgccgttcccgttacgaccaagcctgcgccttttacactgaaagcgcgatctatcgccagacgaaaacgttgatgtaattttttatgctgcttattttgctgatgcaactgcaacagatgctgtctcaaagggacaatactttctttatccgccgcagccgttacaaacagaggggattcactccaaccttgcgttgccagttcatgttcaatttgttggcggacttcaactattcgttgtgtttctacccgatctgctttagtgagcgcaactgtcatggccgggcggccaatcaaacgcagaatagctaaatgttctctcgtttgagccattaccccatcgtcacaggcaaccactaataaaacatgatcaatacctccgatccctgccaacatattagcgaggaatttctcatgtccgggcacatcgataaaaccaaccgaagagccatccggttgcggccaataggcataacctaaatcgatggtcatcccgcgctttttctcttccggcaaatgggctgtattaacgccggtaatcgcttgaataagtgtggttttaccatgatcaacatggcccgcggtggcaaaaatcataatagtttcagaaaattattgtatttcagaaaattacagcaacaatgcctgcaatagcgctttttcatcttcaagacagcgtaaatccagccataaacgtccgccagagatacgaccaagaacgggtttcgctaatccacgccagcaccgggccaaccgctctaacgagctcccctgaccctcaacggcagcgaaagtcaaagcccaacttggcagccgatcaaccggcagtgaaccactgccaatctgtgaataacagggttcatcacgaacaataaattggtcaccgtaatgtgcttgaagctgaggtaatagccgttgtgccatatcatgcatttgttgttgtgagcgggttaacagacgcaacgttggcaactgctggcaaagctgttcggggcgctgatataaccgcaatgtggcttctaaagcggccagcgtcatcttatctgcccgcaaagcacgtttcagcggatgacgctgaatggcttctatccagtgtttcttgccaagaataatgccagcttgtggtccccccagtaatttatcaccagagaaagtgaccagatcgataccctgattcagataatcttgaggcataggttcggctggcaatccatattgcaccatattgatcatggaaccactgcccagatcaattgcagtgggaatttgcgaggctattcccagagtggccaattcacggccagacacttccgcggtaaaaccgtcaatattgtagttactggtatgcactttcatgaggagagcggtctcttcattaatcgcttgccgataatctttcaggtgagtgcggttcgttgtgccgacttcaactaatcggcatcctgcctgaaccatcacatcaggaatacggaatgcgccaccaatttccactagttcgccacgagaaaccaccacttgcttaccggatgctacggttgccaacaataacaacaccgccgctgcattgttattaacaatacaagcatcttccgccccggttaattcacacagtaaatccgccaaagcatggtcacggtgcccacgttcggcgttattgagggaatattccaacgttacaggtgaacgcatcacttgtgttaccgcttcaatcgctgattctgccattaatgctcggccaagattggtgtgaatcaccgtaccactaagattaaacactggctttaaagctaacgcttgtttctgctccagttgctgaccaagtgccgaggcccagttatcacaccaatcaggcagtgcctgatactgcttgatattgattctggcctgctcctgcattcttcttaatgttgcagtgaccaacgtctgtccatattgctccactaatggtgttatttgtggctcacgcaatagacgatcaatggcggggagttggctgtacaacaggcaaggtttatgtgtcatggccttactactactcatttgggaacaaaaacgggttgatgctactgcgggcaaaaccttcctcttccattttggcatcaaggatcagtgacgctaaatcatcagcaacagcttcaacttttggatctttctcctgatagagaattttcaaataactaccgcaatcgccgcaactttccgctttcacggcggcgtgttcactatctaatgaccaataattaagatcgcgggtttgctcgcaattactgcattttacccgtactacatgccattcactttcacacaaactacaatgcagataacgcaacccgttggttgtgccaatctgaacgacacttgagactggcatactgttgcaaaccggacaaaactgacgatgttcaccatattctgccctcgcttttcctgggatttgatttgccatttgtgcccaatagagggaaagtgccgcccagataaaaagtgctttttcagggctgacttgactgaattcatttttcagcagagcatcggccatctgttccagctcctgttctgacgctttttctagattatccagagcggcattaacatgttccgacgcatccggcagtaattctgctatcagagagtgaagtaatttttgccagtgttcagtacgttggaaggttttacaatccagaggcggtttaccttcaatgaccgatttttctaagatatctgctatctccattttcaatggattatcatgcaacgccttttgctgagcttcggcaacttgtgctgaaaagttaagataatcaacgaatgagctctcttttgccaattgttgcaagcgttctgctcgacgctgataaagatttctcagattagcaaaaagcaatggcgggatataatctgctgttttttcattgatgcgatctttgctcaattgttctttaggaacgatgtggatactcattaggttctatcttccttggggctttcagattaataataatctgtaaacttgtttttagcgttcagcatagatcaaaagtggtttctgggctacagagataatacttgaaattatgtggtcggtaataatcaatatattcatgaaatggttgtaaattttttataacccttcattctttgtgtgaattttttgaaagaaaaatattgttaaggcacatcttttgatttaatcttaaaaatccctaaaaagagttaattgtgatttttaacatttctttctatcatattttatatagtctgatagttaattaactcatggttaaaaacatataattaaagtgagtaagcaattgtcaaagatgaatcaaattttcattactgcataaggaaaagatagcaaagctaataattacatttggggctaaaagtgtttcaactatatatggttatttatagtgttactatctatgtattatataataacctcatttaaaaatacagaaagggtaattcaatgctaatcgatctcattacgtcatatagaaaaaccgctgcaatctatacttttgttgatgcgggtttatctattcactttaaaaatggagactatgtagatattaacaaacttgccagtcaatatggtattgattattcgagacttaatcgactatgtgatttcttaattgaaataggcgtattggttagcagtgaccacggagttgcactttctgaggaatgcagtgcacttgctgatcctaatagcgtagaattcttaacagtaaaatatgaaatcaattcagaacattgggattcttggttaatgtatccaaaatccttattggaaaacaatggcaaatcggcatttgaaatggtgcatggaaaatcattttttgagcatttggatagtaataagggattaaaatcagattttgatgctttaatgtcaaaatacacaaataaaataattaaagaattgcttgttatttatgattttgataaacataacagaatattagatctgggtggtggagacggagagcttttgatcagaatcagtgaacaggtcaaaggaaaagattacactgtattggacagatataatgaagtacctatttcagaaggtataaatttcataaaaggagatttttttaagccaattccgacaggttatgatttatatattttaaagaatgttctccataactggcctgataatgatgctatatccattttgaagaactgccgagaagcgatggataataacgcaaccctcctgataataaccttaatgaaaaaaccacaatccttggtagttaaatctgtggatatattaatggatatgctattttcagcgaaacaacgttatttgtctgaattcgaagatatagctaaccaagcggggcttgtcattcgacattataaagatttagatgaaatattttcacttatcgaattaaaggtaaaataaatcattaggggtttaggattatttccaaagatgattatatacccaatagatttcaagatggatcgcgatggcaagggagcgaatccccgggagcatagagaacgatgtgaccggggtgagtgcagccaacaaagaggcaacttgaaagatgacggatatactcatattctatcgttgggaaatatataaaatgtggcatcaagatatttgatgtcacatttttattttatgttaataattaaatatataagcattaaattagaaagcaaatttactctctgacaataaaaacgattaataactatattaaaaaattctattttattttggaaatttatgggaagagttaattgtgatctttgtcatttattttcgtcgaatttaatatagtctgatagttaacaattttgttcctaaaaatgcgttattaaagtaagttgaacaatgggaaaataaggagaatggaatttttattatctcactaagaaaaggtaacaaagctaataattacatattagtgatcgaaatacccaattatgcattatggtatttcatatactttagacaaagacatatacccaatggatttcaagatgcgtcacgacggcaagggagcgaatccccgggagcatagataacgatgtgaccggggtgagtgagcgcagccaacaaagaggcaacttgaaggataacgggtataaaggataactcaatgctagccgaacttattacatcatatagaaaatcagccgcaatctacgcttttgttgataccggtttatctattcactttagaaatggagcttatgtagatatagacgaactttcccgtcaatgtggtattgattattcgcgactggatcgattatgtgatttcttaattgaaattgggatattggttaaccacggccataaagtcaccctttctgaggaatgcagtgcacttgccgatcctgaaagtatggagtcattaattgtaaaatgggaactgagtccagattgctggaacgcttggtcaatgtatccgagatctttacttgaaaatgatggaaaaccggcatttgaaataacgcatggaaaatcattctttgaacatttagcgagtaataaattactcaaatcaaattttgactcttcaatgtcaaagggctcagataaaataattgaaaaactacttgatatttatgattttggtcaatacaacagaatattagatattggaggaggtgagggaagtcttctggtaaaaatgagtgagaaggtaaaaggaaaacattacgctgtattagatagatatgatgaaattcctgttttggaaaatatcgattttataaatggagattttctaaaagtaattccatcaggttatgatttatatattttaaaggatgttattcacgattggtccgataataacgcaatactcattttagaaaattgtcgcaaggcaatggataatggttccgctgttttattgataagttatatgaaaaaaccacaatctaagatggtgatatatttggatatattaatggatgtactattttcaggaaaagaacgttatttgacggaattcgaacgtttggctaaccaggcaggattggttattcaagatgttaaagatatcgatgaatcatcttcaattatccagctaggaataaaataacttaaagataatcatgtattttcattaagtatataccctatggatttcaagatgcatcgcgacggcaagggaacgaatccccgggagcatagataactatgtgaccggggtgagtgagtgcagccaacaaagaagcaacttgaaagatgacgggtataattatatggatattggttctctgaaaaacatatacaagtatgggcggattcgactaatagttgcattttcagaaggcgggcagttgcttagtggcattttctcgcaaagaaatcactatggctatcacactgacgaacagaagaccagattccagttagagagcggttttacagcttttatggagtcactagcgaagcctcgacatcgcaagattgagagaatcagaggtcgacatctgcctgacagctaattgaggttttgcgcgtgcatttcgtaaaagccggaaataccccgagtaaagatgattaaacgtaatgggagattaacctg

SEQ ID NO: 39 - DNA, 700779 bp, Photorhabdus luminescens
  misc_feature (103886)..(103886): n is a, c, g, or t
ttcaaaacctctttataatcatttgaaaattcgaaaccaatttctttttcatactgagaaattaattcatcatctggcaaatcaacatcatttctttgaccatctgataagcgttcgatttcttcaataacatcattaagtttagtattcatacgtaaccctatttaaaatcgttagctcgttgtttccaataatcagaacgccacttattaaactccgagcggttaatacctgaggggatactgttatcatttatcatttatatgtatgaccttatgattatccttatgaaaactctgcgttacctcagctataggtccatcctgcttttgtaacatatgatgtaaattgacaggttttccatcattaccgataggtgctctaccagctctcataagctctacgtttgtcttacctgatttaggatcaatacggcttggatcaaacaagtcatttcgttgataaaccttatttcccttaaagggaactggctcagccgaccaatattttctgtcctggccaaagtattttgcgacatctgtctgtgttgttgtacttgatttattagccgtttggttaggctgtacttgagtagcttccgccggaacgcttttatcaacattattttttgatgatacagatgatggcttcgcctgtatcttattactggctgctcccccaatagccccgaccgcagtctccagcaacaacaggttgcgctgctcttccttcacgtactgcgccgcatccgctttggacaagcccgatttttccagctctttttgacgcagttccgtgttaaaaaacccggagaggggtccgctgccgccatttaaccagctgctctgctctgaacgccctatcttgtcattggcacggtaacctgagacggccagctccttgcccagttcatggttgatgaatgccagttcttcacgactcaactcaccattcaacgccatctgtttcaggctgttgatggtcgcatcactggcctgccggtactctgtccagactcctttacggcagctgtcatcctgacatgatgccagtttaccgcgcatgtcctccactgacggcaagcctttatccagaatgcgctggctcagctccttagccttgccgcacgcttccggtgacagcgtgcggcaatcacccagatttcgcgaggccagcgcattattctccaccgcattcttcccggcctgggctccggtaacggcgcttccggtggagtcaccggcaatgccgccggccagcccggccgccaaagtagaaagagtgctgatggtctgtttttcctcttcacttaagtcactgactttagcattttcgccgtgaatatgcttcatcagttctcgggcagccagttcaccgcccgccgcgcctgccgcacccgccagcgcattgttgccactgacttcggcggctactgcccccagaatggcatgggccagagtattggtgacgacatcgacttgatgagttttcgggtcggtggtcaggtctttaatcaccccggccagataaggagaagcgccgcctgccagtgcctgaccgatatttccgcccgcgagcccctgaatggccgcggtagccgcctgtaaagcagagtggtattttccaccggtgcccagaccagactcattcaatgccgcgttataggcagtcttgtaaatctggtctttaataagcgccggggtgatgtcggttttacctttatccttcagtacttttatagccgcttctctatccgggtcactgatgttctccagtttggcgtgggctgctttggtggcgataatggccccttcggtactggcgatatcaatcacctgcgcactgatttcgccaatcagttgggcctgtttcagccgttgctgctctttctctttgtcaaagataggactgagagcattgttagcatggtcggtatcccggctgagggcggtgacatcctgttgctggtggtctttatcccggataatcagggtgccgtcactgaccgcggcgtgagtggtgctttgggcgtggccttcccggttagcgccgcccagggtgttggccgccagattactgaggaacatgccgccggctgaaccccctgtgctgatactcgcactatggtgttcggttttaaaatccgctttgtttttgatatcgccaaagcccagcgtgccggtatcgagggtgtttttgtctttgtctgcggtactggcaatgactgcgccatcaagctgagtatgttcacccacttttacctgatagccgcctttgccggcaaacagtccggtttgttcttgtacggagtcaaagttgctgtggattttgtcgcggctggcgctgaggttcaatgagccgcccggttgtggaccgagagtaacactgacgccggcactgacgttctgctgcttcatatcgtagcggttgctgtcctgctcgctgctgagcgtcaggtggcgtttgacgtcggcagtaatctgttcgccgctgacctgagcgcctttgagcgaggcatcccggccggcgttgagggtgacagtttgccccgcatccagcgtagtttcattatggctgacgccgttaccgctttcacggcctttgccgtggttggtgctggcggagagattgattcccgtgccccccggtccggcagtgaaaccgacgcccagtgagccaccgcgactgctgtttttgccggtggtctgttcggtgttctggctggatgagagctggatatcccggctggcattgagttgcaggtctttgcccgcctgcaactggccgccctgaatgcggatatcgccgtgctggtttggtgtgccggaagcggtgagggtgagattatccccggtcatcaggctgctgccctgttgagtggtctggtgctgtttctgctctgaccgggaggactggcggccgtaggagaggctgactcccaccagattgttgttagctttgtcgtcaccacctttagcatcggccagacgggctgcctggactgcctgtaccccgctaagggcggctttggtgccctgtaaggctttgatacggctgtcactttcattgttagcggtttgaaccgtttgaacggcggaattcagggctccgcctgcggtgccggatagtgccacggtcaggccgctttgtttctgttcggttttggtgatagcggtgtgactgttttccgcactggtgatgtgaatgttttggccggaaagttgcgtatcgcggcccgccacgacatcactgccgtgaatgttgagctgttttccggcgctgaatgttacattgccctggctgctgccgaccgtgctgcctttgttgaggttgctgtcgatatcggtagtcgatttttgactggctttgccgacggagaagccgatgccgccggtccccatcagaccggattttttctcttgtttgaagtgcgtttcatgacgggcttcatccgcggtagtgatggtgagctgattgcctgcggccagatgaacatcctgagtgccagccacgttactgccgatgatgttgaggtcatttccggtttgtaaggttacgcggtcgccgctgagcgtggtgctttgtgcccggcgttcatgcacttcgtcgtgggtttcgacggaggatttggagagtaagcctttactagtctgtttgctgtgttctatcaggtctgaggaagcggtaccggtattcagggtgatattgttcccggcctgagcggtaagttgttgaccggcgtttacgttagccgcggtagcattgaggttattgcccgctctcagcgccaggttaccggcggtggttatctggctaccgacgtcatgttgttgtgtcagatggcgatagttgtcgctcccccagtcactgttttctgtgcgatgggtgcgcagggtatccagagtcaggtcaaggcccgcggttatctctgtctgaccgtctttgcccgcattttccacgtcactggccgtgagatggatgttgttgagggctttcagcgacaaggtgccgttgtcgttctggacataaatgcccgcaggccgatcttgccaacggtcagcacctgctccgcgcagggtagaggcactggtgatatcccgatctgcctgtgcggaaacgcggtcacggccccgaatttgtccgccgaggttggtgatgtcctgccgggcggttaaatccactttgccgctttggataaagccgctgttggtcagattgctggcggccagttgggtgacttcacgtccgctgatggtgccgctgttggtaatatctcttcggctatttattgtcacgtttttaccggagagtagagcaccgtcactggtcagatcgcctttattcacgcgagcgtagacctgtggcacggtcacggtctgttttgtgccatctgccagagtcacggtccggttggtcagccagataatgtcagaagtgagtagcgccatctgcgatggactcaaggcgatgccgggggtgagctgttgctgtttgctgaaggcaacaccggcttccattaacgctttgaactgagtttcatcgttgttgtggcccgccaggtaacgctgaccagtcagttgggtgatttgatcacgcaccaggcgctgttcgtagaacccatctcccaggcgtttgtgtgccagtaccgggtcgtgggttaactgttgttgcatgtaatccgtgcctagccactttttatattgggtgaatttagggtcggtctccactaaataatggctgtcactgcccggctgtacgacaaacaggctgttggccggtaggcgggtatctggagcaacgatacggataagaggttcgacgctttgaccttggacggtatcagacggtagcgtcaattcaaattgttggcctgttggtaacaccagcgggcgctcatctaatggaccactgttgggtagagtgaccgtcaccggggggagtacccgttcagtttgttgaacgggtggaagtaccgggtgttcagtgagtgcatctctgtttggtagtactactgcgctggacgataatacctgctcagtctgttgacctgtaggtgaaagtgttgggtgttcagtgagtgcatctcggcttggtagtgccactgcgccagacgataatagctgctcagtctgttgacctgtaggtgaaagtaatgggcgatcagtcggtatgtccctgttcggtagtgtgatggcgttgatcgtggcattggtgaatgtaacttcaccagcttccgccattcttgaggtcagattaatcccggttggtgtactttgaacacggcttgtctgcctgtcatctattgttatgccggtagagtttggacgagtgttgccctgccaggctagggctttcaggtcaatggtttcggttatcggtgctgggttatagtggtcccagtcttttccttgggaggttttggttcctctgaatcgacgttttttctttttggcataccaacggatttcgctaccttcatccgtgatgatacgttcgcctttggtggcgttattgtgcagttcgtcaatatcacccccgagtattccacccgctacgatctgactgtcgtcattggtcagcatcgcactattgatggtcatattacccccggataaaattttacccggatcactctcttttatctgggtttcattgatggtacgggtatatcggtactcgtaaaattcttcacttccgctgccatccggcatgacggctctgtgcacgccgtatttgttgcgacgggaagtattcacctgtgaccagtcatagcgggcagtgcggccgctcaatacggcttcatgacgctgggatttttctgtttcgacgatatcggtgaccaaaccgttgttggtatttttgataatagcggcatcaatctttaggctacccccggcctcaatggttgccgcgtggttgctgagtcggccagcttgactcgtcgcagccaggttttcatccagttgtccaccaatgcgcatgtcacccacgctgtaaatctgggcatggttacggttgttgagggttccggtgccgatatctagtcgatctctagcggcaatgacggcggctttgccatcttttgctgtgttattgagagtgccactcttgagggctatttggtcaccgtaaatacgtccggttccggtgttgtccagtactttgttggcggtgagatgggtcagttcgccgtcaattaacccggtgttggtcagcgtgtttcggacgttgacttcggtttgcttggctctgatttccgcagtttgggtgttggtgagattttgggcttccaggtacgcctgttcggctttcattgtgctgtcattgataatgttgccgtcggtttccaaagacagcttgccatcggcggcgatgttaccggtgttgtggaagtcttgctttaatttcacctctatatcgccctgcgataagatttgaccgtcaccgctcaaggcgttggctttaattttgaccttttcacttcccgtcagtgtgccttgctggttattcaccgtcagtttctgggttttatcttcgatggtgagttgttttccaccggagattagtccttgttcgtttttcagcgactggttaatgatagcttgcaggcggttggctccctgtaatgttccctgggtgttatctatctgttgagcttcaattatcaggtcttgggcttcggtaccctggtcaggatgattagtctcccggttaatgagttctgctgtttttagtgtcagttgttggtcactgtggataaggccgccggtattgttcgtttgtttcggcgcgttaatcgtcgcgtcacctatggctttgacctgtccgcgacggttgtcgagctgtagggtattcaagttcatggtgtctgctgacaacagtttaccgtcttggttatccgtatcggcttgtccggtgttgatggtgagttttttaccctgaatatgtccgtgttggttattcagtttgccactggtcacggtggtgttgtcatcgccaataatacggccatgctggttgtccagtagctgcccgtttgtgtcaatattgacggtgtttgctgacttcaatgagccattgctgttggtaagcgtttggctatgaatctccagtccactgttaccagcaatcagtccttttttattggtgagggttgtactggtaatcttagttttgccatccgcggcgataaagctagcgtcgttgtttaattctccgatatccagtgttaaatcgccctgagcagagaattcgcctgatttgtctttgtcacccgtgttattcaggcgttggccttgcgtgttgaggttcaggttgccatcagaatggaccttgccttgttggttattaaatgcttgggtaatcagctttatctgttgggtaccaacaatggtgttttggagattatttacggttgcgattttgcgattggtaattgtaccagcctgattatgtaaatcaccgctggtaattaacatatcgtcctggctgcggataccgccccgatcaccactgtttttattagtcagtgaatgaccgtgtgtatcgagagtaagtttacctgcggattgcaacaggccgccgctgttgtcagtttggttcactgataatgttagagaacctttttcgctgatgagggttccaccttggtttttcagttcaccgccggtaacgatcgttgttcctgtacctttgataaaaccatcttgattgtcgatttcgtcggcagtcagggtcatcgttccttcactgataacgcctctggtatcgccgcttttggcggtggtcagtttttttccgtgagtatctatcgtcatgttgccgtcagactttattagtccaccggtactgtctaactcgccgctatcgagttttagatttttcttactgactatagtgccagttaggttgcttaatgtctgttgatgagaattgatgtgcgtttcatcgccacggatatatccgaaatcattgatgagttcacctgtaatcagttttaggctatccagtgcgagtattccgttaagttttccgctatcggtattcgtcagtttctgctgttgggtatccagtttcagactggctgaggattgtatcagtccacgttggttgttgattgcttgtgtggtcagatctgcttttcctttcgagaggattttaccgtcggtgttgttgaggttttggctagttaatttggtttcgccttgtgaatctatcttgccagcggtgttatcaatttcaccggcttccagtgtcaggtcactgtcgctgcgtatgccgaggtcatccccgctttgcgtattagtcagcttttggccgtgggtgttaagataaagggttgttttggattgcagcaaaccactggtgttattcagttcaccggtattcatggtgagttgttgatgctggctgactattttaccgctggtattatcaacggctcctgttgatgtcacgttgagctgcttatcggcgatgactcttccctgttggttatcgatagcgcccgcagttattgtcaactctccctggcttgttatcccctgttcaggttggctgttgcggttggttattttgccttgtttcccatctagagtcaggtttttatccgcatggatccagccagcttcgttattgatgccttgagtagtcagtttgacattgcctgtaccgattatgcccccggttttgccgctgttgaggttagtcagtagttcaccttgtgtatcaagagtcaaatcacccgcggatttcaacaggccgccgctgttatcggtttttttcacggtcaatgtgagcgagccggtttcactggcaagggttccgccttggtttttcagatcaccaccagtaacggtggttgttcctgtacctttgataaaaccatcttggttgtcaatttcaccagtggtcagcgtcagtgttccattgctaataacgccactggttttgtcgcttttggcggtggtcagttttttcccgtgcgtgtccagtatcatatcgccggtagactctattcgtcctccggtactattaagttctccactgtcgagctgtaggtttttcttactgaatatggtgccagccaagttgtttagtgcttgctgatgagtgttaatgtgggtttcgttaccacgaatatcgccgcggtcattgatcagtttaccggtagtcagttccaaggcatcttctgcgacgatcccgtttttaccgctatcggtgttggtgagttcatgctgttgtgtatctaatttcagactggctgaggattgtatcagcccacgttggttgttgacggcttgtgttgtcagatcggcttttcctttcgagaggattttaccgtcagtgttgttgaggttttggctagttagcgtggttttgccttgtgaatctatcttgccagcggtgttatcaatttcaccggcttccagagtcaggtcactgtcgctgcgtatgccgaggtcatccccgctttgtgtattagtcagcttttggccgtgggtgttaagataaagggttgttttggattgcagcaaaccactggtgttattcaattcaccggtattcatggtgagttgttgatgctggctgaccattttaccgctggtattatcaacggctcctgttgatgtcacgttgagctgcttatcggcgatgattcttccctgttggttatcgatagcgcccgcggttattgtcaactctccctggcttgagatcccctgtttaggctggctgttgcggttggttattttgccttgttgcccatctagagtcaggtttttatccgcatggatccagcccgcgtcattattgatgccttgagcagtcagcttgacattgcctgcactgattatgcctccggtcttgccactgttgaggttagtcagtagctcaccttgtgtatcgagtgtcagatcacccgcggatttcaacaggccgctgctgttatcggtttttttcacggtcaatgtgagtgagccggtttcactggcgagggttccgccttggtttttcagctcaccgccggtaacggtggttgttcctgtaccgataatcacaccgtcttggttgtcaatatcgccagtggtcagcgtcatatcgccggtagactctattctcccgccggtactgttaagttctccgctatcaagttttagatttttcttactgaatatggtgccagccacattgtttagcgcttgctgatgggtgttaatgaggatttgatcaccacggatagatccgcggtcgttgatcagtttaccggtagccagttctaaagcctcttctgcgatgatcccgccgtcggtgctagtcagttcgtgctgttgtgtatctaatttcaaactggttgcggattgtatcagtccgctttggttgttgaccgtttgtgttgtcagatcggcttttttccgcgagaggattttaccgctggtgttattgaggttttggctagttagcgaggtttcaccttgcgcatctatcaggccagcggtgttatcaatttcaccggcttccagcttcagatcactgccgctgcggataccgcgtttttctccgctctgtgcgttagtcagtttctggccttgggtgttgagcgacagggttgtgccggatttcagtagaccaccggtgttgtcaactatcccggatgttacggtgagttgtttatcagcttctacagatccttgatggttatcaatagcacttgccgtcagcgtcaagtctcctgagctacgaataccttgattaggctggctgttgctattggttatggttcccttctgcccgtcaaggatcagatttttacccgcatggattaggcccgcatcgttgttaacgccttgggtcgtcagcttcatgttgcctatgctgatgatgccccggtctttgccgctgttggtgttggttagcagcccacttttcgtatccagtgtcagatcacccgcggattgcagtagtccaccgctgttgtcagtgttgtttaccgttaatgtcaggggaccggttttgctgacaagttttcctcgttggttgtggagttctccacccgttatcgttgtcgttcctgtacccgtgatggtgccatcgtggttgtctatctcgcctgtttttaaggtgagcgctcccttactggtcacgccacccgtgtcactacttttagcggtggtgagctttttcccgtgggtgtctaatgtcatgtcgccatcagattttatttgtccactggtactgtcgagctctccactgtcaagttgcagatttttcttgctcgctatggtgcctttttggttgcttagccgttgttcatgggtatcgatgtgaatgccatgaccaaggataacgcccgcattattagtcaggttaccgctggaaatgcgtaatgagtctttggcaatgataccgccagttttgccactgtcggtattggtcagggcttggttttgggtatccaacaacaggcttgactctgattggatctgtccacgagtgttatctaatgcttgtgtggtcagttccgccatctgttgtgataagagttggccgtcggtattgtcaacgttaccggcgttaagggtggtttttcctttagcggaaataataccagcggtgttgttgatatctcctgtacggagttccagattacctttgcttaatatggtgccttttttgatctctttttcgtcaccatttttagtgtctttagtattagtcaatttctgtccatgagtattgactatcatgtcactgtcggattgtaacagaccagacgtgttatccagttcaccgctgtttagggtgagtttttcttgagcaataacttgtcctgcggtgttggtgaatttatgtcctttggtttggctatctattcgctgagccagtaatgatccttgatggttattcaacgcctgactttttgtggtgagctctgttttggtttcgattcgtccgtcaacgttttcaatgtttttctcaatgatcagttctgtgctgccaccggttgcaacgattttgcctttgctgttatccaaggtggtggcattgattttcaggttgccattacctttaatctcgccattttggttattcagtgtcttggcagtgagggacatcttatctttgccattctgctgcattactccactctgatggcttaatgtgtctgtttttattgtaatcttgtcggcggtagtgactgcttttttgttcagttgcaggttgtgggcttgtatatccagttcaccattggagagcagttcgcctccgtcacctatccactgatgggtgttgagtgacagtttacctttaccggcgagttgaattgtccctccttctgtgttgtccgctttctcgtggacggttaggttcaggtcattcccgttattggcgatttttccatgacggttgtccagatttcttgtggtgatagccagtcgtttcccttcattgagaagggtcccgctttggttattcagtgtttgggtgttcagtaccagctcgccgttgccggtttgattaatttttccctgattgttggataagtctggagtcgttaagttgatttctcgtgctaccagtgtgccgccgtcgttgttaaattggcctggtgctttagctgtaaagcggtccgcggtgactgtagcgttggcggtactaatctcttgctgactggcagtgagctgaatgttgttagcagaagtttggctgccgctgagatcaatctttttactctgtgcttccagagtattggttgccagattttttccattggcctgaatgtgctgtttggcggtcagtgtcagcgatccgggcagtgtggcttttcctttattatcaataccggcggatagggtgctgccgctggcgctttgtatcgactccgctttgattatggtattgcttcgtgcggcaattgtgccactgttctcaatcagtccatcaaccgtgagacggacttcaccggcggttgctccgatgtggccggcgttacgtacccctacgccaaattcggtacccaccagcataattttattggcgtacatgccacccaaagctgctacgtccagcgtaaatgagggattctcgctgccgtcagcagattttttctcaatgttctggtgagctgcatcaacgatattacgtccggttgtgatttttagatctttcgcgtgcagtttgccgttgatgaccaccgagcgggcaataatttcggtgtaattttgttgtgagctgtccagtcccagcccttctatgcggacttctccccggtcaatatcaaagcctttcagtcggccttgttccatcatggcctgtcctgtggtgagtgttgcgcgatgggcgttaatgaatccgcagccgttgcaagtgatgcccgccgggttggcaataataacgttggctttttgtccggcgacttctatccagccattaagtttactggcgttaatactgttcacttcattgagaatgattttggcttctgctttggcaagccaaggattgcctgccaccataccgcccagttgagtttggacagcattgtgactgttgttaaggatgacgcctcgtttatcgatatcaaattggctgtaggtattacgcgagatacctgcggcgttaggggtttgaatatcgatttgtggcgtaccgtttgcactgttcaggatagtcggttgctgattacccggtgcttgtccgtcggccacaatattggcttgtgctgttagggagatgcagccggttgccaataacaaactcagtcgtaacgctgttaaccggcaaaggcattgtggtgattgccgacgactgcggcggcgtaccgtactaccttgcccggaagttgcaatatcggccacgaccatcagcatgtttcgtgctttgttaaagataatacgatacagatgcttgttcattgtttctctccgctaacactttttatctactacgcttcggcaacgttgttattctgaattagtactgccagtacaaactgaatccggttgtaactgatgaggtttgaaagccatccggtttggatagtgggataccggcaaacaggtcatagctcacgcctttaagactgccgcgacaacctagaacgccgcccgccagatgttttcccagtcgttgctcattccccggcccgccgatttcgccataatccatgcccatatatagggattgaccattcagtggcgtttgccattccagttcgttacggctgtaccaaccatgatctccatttagtgtgcgttcgccgtcaaatccgcgtacggtccagcgattgccaattgaaaattgatcctgtggcgtcaacgttctggcgcttatttggcgcaggtactgggttttgtagatgaatggctgagaaaatagggtaaatggcgcagaaagtgccgcagaaaactgggttgttttaagtaaggcagttgcttcaccgcggacctcttctggtgcgggttgtgccccaaaccagcgagttccccgctggtaagtcactccggcatccaaggtggcactaccgatgtagtgacgatgagataatcctaatttccagccagctgtttcccggcgctgtacgccgatttccaggtcattaatgaagcttttggatgttcgacgataaatctcgccgttaaccgaggttttttgaccggcgttacgatgcaagatccggctgagttggacattcagatttttgctttcgccgctgtatttgtcgtctttagttggcctggctaccttttggttgtaatcgtaattactggcagtgatgcctgccatccagtatcccactggtagggagtaatggatggtgtagtttttgctgctgcgaccagaaggagagcgaatatcgcgcccaccggagatataaaatagatcactcaacgcaagaggattatccagatataaagttaatccgccttggtaacgcccggtacttttagaacccgaatcgtccagatagctagcgagtcgccaatgtcgtgactgacgccagttcagcacgatatcgctttcgcctaactgttcattcggtacaatttccatgtcggcttgaacagtaggaaaacgttgtaaattttctaatccttgctcaatatcccgtaagtcaagcagttctccttcgcggggaggaaatgtggttattcgttgaatataattgccactttcagcggtatagcgaatatgcccaattttgcccggtatgatcatgagttttaatgtcttggaattaagattctgactgggtgctaatactcggctagtgacatagccatgattaattaaccggttttgtatccgagtcattaatatattaatcccctgggtgcccagacattggttttctccctgttgggctaaacgctttaaaggtaaccagtgaggaaaatgttccgtgccttcaagaacgactcgcgtaatgggaaagcagggcgtatcgacgggaaatgtagaaggtactgctgtttcaggaacagacagacgaatatccgccggtggcggcgctaattgggcttccagtgctttctgccgttcttgttgatgaatgagttgctgatctgatatttcggcggctttaacatcggtagtaacaataagaaagctagtaaaaataataaccttttttttcattattctttggcatcccgcacgcgtcatataatttttggggcgctattagtcattaatttgacttaataatcaatatgtggatttacctagtgatataattgaaaaatatggcttgttttaaatttctaataaaaacaaatagatatatttttatttgaaaatgagcaagagtgaaaaatgcgttgttaattaatgagttatgtaactaatgtcaggtatttttgatttaattctatatattgataaatatgtgatatatgtcactaagaatattattatgtaattaaagttaaagtaactgaataaactattactttatttattaaataatgggcgagcttgtttctctcagttaagattgatgattttttattagttacagcgtgtttattcagccatgaaatgtcttggtaaagggggctgaggccctggaaatgattgaatgctccgagccatgccctaattccatctatacccttcatctttcaagctgctgctttgttggctgcgttcacttaccccagtcacatagttatctatgctcctggggatgcgttctcttgccgccgcactgcaacttgaaatctattgggtatatacccgtcatctttcaagttgcctctttgttggctgcactcgctcaccccggtcacatagttatctatgctcccggggattcactcccttgccgccgcgatgcatcttgaaatccataaggtatattgatttcgatatcaaaatgatttagtaagaaattttcgctttatttctcttcttctccatttgcacttgatttactgttggctgtcagtaaataaggcgattgttgccatcgacttggtgttaattgcaataggttatgtgccagaataaaaccaattgctaaagcgagtaagatcatgatccggagtaagttagttgtgttatccacctgcttggactcagttgccaatttgtgggtatccagcgtcaggcgcagaaagccttttggctcatcttttcctgggatggggacgactatctggtagttaaaatagctgcccgcttttttaccatccaaagatagacgatcccgcaccgagacgttttctccgctatgggcaacctgtgtcccattgttaagataaacactggcatcaagtatgcggctgtttgtcgtcagatgatgcaaattagccagtatccgctcattattaagatctttgctgccactctccatataatcagataagctgaatgcgacttgttttgccaaggtttttgccaattcctcaaattgatccatctgggcttgttggtgagaacggctgaaataagaaacgccctgcattagaaatactaataaagcaatgcaaatcaagataatagctgttttatgcagtcggaattttaatttagctttgatcatcgttatctcttccaagctttggtcaacgcaatgttgccagatgcagtacagagaggatagtttgaagcgcaattttttgctgtcaaatcatgtgggattacaggagtagggattaatgtctaataacctggcttatcactatttgccggaagaggtccataagtggccgggattaccactttcgttaagtggtgaagaagtgatgccgttggattaccgagcgggtgacagtggttggttgatatatggccgtggcctggataaacaacgtattagtaattttcaacatcggcttggcgctgctattgtcatcgtttcttcatggcgtattgatgattatcaggtagtacgtattgccggaaatttgactgctcgtattaaacggctagctgatgagtgtcggttagatgtggttcccttggggcagatcccacggttgcggtcaccaggtttgctggtgatggatatggattcaacagcaattcaaattgaatgtattgatgaaattgcccgtttggctggcgtaggtgacaaagtggccgaaattactgagcgggcaatgcaaggagagttggatttttctgatagtctgcgagagcgagttgctcagttggcaggggctgatgctgatattctgcgacaggttgtagaaaatttaccacttatgccggggctgaccagtctggtgcgtaagttacaatcctttgattggcatgtggccatcgcatcgggtggttttacctattttgctgaccatttacgccagaatttacgtttggtggctgcggtagctaatcagttagaagtcaaaaatagtcagttgacaggtaaggttatagggcccgttgttgatgctaaatataaggctgctacattggtgaaattggcgaaaaaactggatatcccattggagcaaactgtcgcgattggtgacggcgctaatgacttgaagatgatccgcaaagcagggttaggtatcgcttaccatgccaagccgaaagtgtatgcacagtcgaaagtgaccattcgtcatgctgatctcatgggagtattgtgtgtgttaagtggtggtctcaaacacgaagaacgttaatataccctatggatttcaagatgcatcgcgacggcaagggagtgaatccccgggagcatagcgaacgatgtgaccggggtgagcgagtgcagccaacaaagaggcaacttgaaagatgacgggtataaagtttttaggagtgcagagtggctaaagcagtaaagcgggcatttgtctgtaatgagtgtggggcggattatccgcgctggcaggggcaatgtagtgcgtgtcatgcttggaataccattacggaggtgcgcttagccgcagcaccttcctcccgtaatgagcggctcagtggttatgcgggagatgctggtgtcagtagggttcagaaattatcagagatcagtctggaagaacttcctcgtttttctaccgggtttaaagagttcgatcgggtgcttggcggtggtgttgttcccggtagtgcgattctgattggtggtaatccgggagcagggaaaagtaccttattgttgcagacgatgtgtcagttgtctgcacagatgaaaactttatatgtcactggggaagagtcgttacagcaggtggcaatgcgtgcgcaccggttgggattgccggctgataatctgaatatgttgtcagaaaccagtattgaacaaatttgtctgattgcggagcaggaacagccaaagttgatggtgattgactccattcaagtgatgcatatggcagatattcaatcttcgccggggagtgttgctcaggtcagagagacggccgcttatcttactcggtttgctaagactcgtggtgttgccattgttatggttggtcatgtgaccaaagatggctcgttggcgggtccgaaggtgttggaacactgtattgactgctctgtgatgcttgatggtgaagcggattcccgctttcgcactttacgcagtcataaaaatcggtttggggccgttaatgagcttggcgtattcgctatgacagaacaaggattgcgtgaggttagtaacccatcagcgattttcctgagccgtggtgatgaagttaccgctggcagttctgtcatggtggtgtgggaagggactcgtcctctgttggtcgagattcaagcgctggtggatcattctatgatgaccaatccacggcgggtggctgtgggtttggagcaaaaccggttggctattttgttggctgtccttcatcgtcatggtggtttgcaaatgtccgatcaggatgtgtttgtgaatgttgtggggggagttaaagttgcggaaaccagcgcggatctcgctttactgctctctttagtctccagttttcgggatcggccgttaccccgtgatttggttgtatttggagaggtgggactggcaggggaaatccgtcctgtgcccagtggacaggagcgtatatccgaagccgctaaacatggttttaaacgggcgatagtcccttatgccaatatgccgaaaaaagcgctgccagggatggaagtttttggtgtgaaaaagttggcggatgcgttatctgttatggatgattttgattaaacagggaggagatatggggcaatttgactaccttaaagaagcgattaaacagacaggttatacgttgcaacaggttgccgatgcaagtggtatgaccaaaggttatcttagccaattaattaatgacaaaattaaaagtcctagtgcccaaaaactggcggcgctccatcactatctgaggttgcaatatcctgtgcaaaataaaactgttggagtggtattcggcaaattctatccattgcatactgggcatatctatctgattcaacgggcctgtagtcaggtggatgagttgcatattatcctttgccatgatgagcctagagatcgggagctatttatgagtagttccatgtctcagcaacccacggtgagtgatcgcttgcgctggttgcttcaaacatttaagtatcagaaaaatattcatattcactcttttgatgaacagggaattgaaccctatccacatggttgggatgtgtggagtgatggcatgaaagcctttatgtcaaagaaaggcattcatcccacttatatatattccagcgaaactcaggattctccccgatataaagagcatttaggaattgagacaattcttatcgatccacaacgttcgtttatgaaaatcagtggtcggcatattcgccaagatccattccgtcattgggaatatattcctaccgaagtgaaacctttctttgttcgtaccgtagcgattcttggtggagaatctagtggtaaatctacattagttaacaaattggcaaatatttttaatacgacaagtgcttgggaatatggtcgtgattatgttttttctcatctggggggagatgagatggcgctacaatattcggactatgacaagattgcattgggacaagcccaatatattgattttgccgtaaaatatgcgaataaggttacatttatcgataccgattttgtcactacccaagcattctgtaagcgatatgaaggacgtgaacacccgtttgttcaggcattaattgatgaataccgatttgatttggtcattctactggaaaacaacactccttgggttgctgacggtttgcgtagccttggcagcgagcaggatcgtaaagcgtttcagcaactgctggaggatatgctgaaaagtaataatattgaatatgtcaatgtggattcacccgattatgatcagcgtttcctacgttgtattgagctcattcagcaacttttagcggctaatcctaaatgacacgtcagttgaatcgtttataattagatttgtatataatattttatataataaattagtaaatatatatctaatcacaatatgcattgtggctggatatttttattttctgtaagtaataaaatatataacggctattaatatttttgatacttctattgattatttatttcttgaataaaaacaaaattaataattaaatacttccctgttgatttttaaataaaagtttttgtgtttttgattggttggggaataatgggaggctggttttttattaataatttaatgttcaaagtatcattgttatgatggtaattaaatattaattttaacatgttgttatgatattaaggtgtttttatctataaaaaattatttgtctgatgttatttttttatttgtactaacaagataatggcctgttgctaatgagtggttgataggaatgggttgatcttgtttagtaaaattttgattttagcatgcagatagtcatttgaaatagtcactggtagaaatattgatatactttcaattgagatatttcttatatgattttccctcgtttgtgtaatcttataatgatgaatatctgtatttttacggattgctctggctgtaagagttactgataatgccagatttcttacactattaattatgctgagataatgaatttgaatcaaatcgctacgattgaagccattgatatttcatatggtttttcgaacagtaaagctaaccagaaaacgatttcagacatcactctttctatttttccaggtgaatttactttgattaatggggatctctgttcaggaaaaagtactttactggcaatgatttctgggttattgcctctcgatggaggaaaaatattaattgctgataacgagttggggaggctgaataacttcgagttagatagattccatttgatgaattgtggttttatctttcaaagaattaatttatctaatgaacttacggtcttggataatttgctattatctctctcttgtggaatcacgacttctcatcaggaagcaatagtcagagcaactaaggcactcaatattgttggcctgaaacacaagaaagatatatatcccaaggaattgcgtgataatgaaaaacaacggctggcaatagccagtgccattgtgaaaagccctcggtatttgtttgctgacgagccaacccgtcatcttaataattatgactgtcaaacagctattgatatcttaggttttattgctcataaccaaagaggtacggttgttgtggcttcacaggataataggcttatcaaacatgccgatcgtattattactttgaaaggaggaaagattatccatgatacgtatcttacacataacataatgaataagactatgagtttatatctaaataattgagtggaaaacggcctgttgccaggccattttcaatatgattatttgctgattctcttatatttaatgcgatgcggttccagtgcttctgctccgagagtccgcttcttatagtcttcgtattcactaaagttaccttcaaagaaagtgactttaccttcatcttgataatcaatgatgtgggttgcgatacgatcaaggaaccaacgatcatgggaaataaccattgcacaacctgggaactccagcaaggcgttttccagtgcgcgcaaagtttcaatgtccaggtcgttggttggttcatcgagcaacagcatgttaccgccgacttgcagcagtttagccaaatgcagtcgtcctctttcaccaccagacaattcaccgacacgtttaccttgatcaatacctttgaagttaaaacggccaacataggcacgacttggtagctcaaaattaccgatacgcatgatatcttggccgccggagatctcttcccaaacggttttcttatcatccatgttgtcacggaactgatcgacagaagcgagtttgacggtttcacctaatgtgatggtgccggaatcgggttgttcctggttggagatcatacggaacagggtagatttacctgcaccgttaggcccgataatcccgacaatcgctcctttaggcagagagaagttcagattatcaatcagaacccggtcgccataggatttggttagattttccacttccagaattttgtcgcccaggcgtggcccaggtggaatgaacagctcgctggtttcgttacgtttctggtattcaacgctatttaattcttcaaaacgggccagacgtgctttaccttttgcctgacggcctttcggattttggcgaacccattccagctctttctcaatggatttacggcgtgcagcttctgttgcggcttcttgagccagacgagcatctttctgttccagccatgaagagtagttaccttcccacggaatgccttcaccacgatcaagttccagaatccagccagcaacgttatcaaggaagtaacggtcgtgggtaattgcaaccacggtaccttcgtaattgtgcaggaagcgttctagccaagcgacagattcggcgtcaagatggttagtgggttcgtccagtagcagcatgtcgggtttttccagcagtaagcggcagattgccacacggcggcgttcccctccagagagatgctcgatttttgcatcccacggcggcagacgcagggcatcagcggcacgttcaagctggttatcaaggttatgaccatcgtgggattgaataatcgcttccagctcaccttgctctttagccagtttgtcaaaatcagcatcaggatcagcataggctgcgtaaacttcatccaaacgggtcagcgcgtgttttacctcactaacggcttcttccactgcttcgcggacagtatattcaaggtttaatttaggctcctgcggtagatagccaattttaattcctggttgtggtcgggcttctccttcgatatcgttatcgatgccggccataatgcgcaataaggtagacttaccggcgccattaagaccaagaaccccaatttttgctcccggaaagaaactcaaggagatatttttcagaatatggcgcttcgggggaacaattttaccaacccgatgcatggtgtagacatattgagccacgttgctataagcctcgctatctctgatggtgataatgcctgttttgcgaagcaagtcgcatggacagggcgcgttgatacctgattatatccgtttaggttgttgatgttcatctgaatatgatttgtcacagtttacccgatttaagttaataaactctatacccgttatctttcaagttgcctctttgttggctgcgctcgctcaccccggtcacatagtttgctatgctcccggggattcactctcttgccgtcgcgatgcatcttgaaatccatagtgtatataacccaattgcccgaataagatgatcctaggttgaatttgttaaagtgaatcaatttattggataaaaaacttacctgttctggatatgtagttagatatttcatcatagggtgaattaatgtggtaagcggtggtaattatattattatgctgtttatgcattcgtaatattaacctatttgatttgatctccgggaggagcgtgataatggctaaatggcaatgccttacgatggctatagggttgatttttatctctgtagccgtaaatgctgattctctggaaaatcagcgacagagatatcagcagattaagcaagcgtggaatgtcagcgatagggctgaagttgcgagactgatgcccacattgaaaaactatcctctttatccttatctgcaataccgggaactggctcaggatctgtcacttgccaccccgacgcggattcgtgattttattgatcgtcaccccaatctgcctcccgcacgttctttatcatcccgttttatcaatgaacttgcacgccgcgaagagtggcgcgagctactggcgttcacctctactgcaccaaaatcgattaccgcccgctgtcattactattttgctaaatgggctacaggtgaggagcagattgcctggcagggagcgaaagaagtttggttgaatgggcgttctttaccagacagttgcgataaattatttgatgtttggcagcaaacaggccatttatcagtaaaactgatattacagcgtattagtctcgcgttaaaagcgggcaatacatcattagtcagttacctcgctaaacagttaccacagggatacaaaagtatcagtgaaggtctgattaagttgcagaatgatccggttaccgtaacagactttgctgatcataccgggccgactgattttagccgtgtagccactttagcggctttttcgcgtttcgcacgtcaagatccggagcaggcaagagtgatcatcccatcaattgtcagagtgcaaaagatgactgcaagtgaacgtcagcgattaaaagatattgttgcctggcagttaatgggtgatgtgagtgatgaacaggaaaagtggcgtgatgatgtgatccgcgatagccaatctgttgcattgcttgagcgtcgtgttcgtttggcgttgggtcatgcagatgagcgtggtgtggctcaatggataaaattgctaccgttagagaaccaagacaaagaggaatggcgttattggcgagctaacattctattggcgcagggtaataaaagtgaaggtgaggcaatattgcgtcagctaacagaaggccgtggtttttatccaatggttgctgcgcagaaactgaatgtcagctatccgctgatgatgaatagcgcaaaaaagccagatgctgctattgcttcaatacccgaagtacagagagtaagagagttgctatattggcaaatggatagccttgctcgcatagagtggagttacttggtcgccagccaagataaattaaaacaacagcaactggcgcgttatgctttcgatcaaaaatgggcggcgcttagtgtacaggcgacaataaccggaaaaatgtgggactaccttgaagagcgttttccattggcatggcggcgggaatttagtcacttcacggcaaataaagggatttctcaaagttatgcaatggcgatagcccgtcaggaaagtgcctggaatccgcaagctaattcgccagttggggcaattgggttgatgcaagtgatgccagaaacggcgcaagatacggttaagcaaaatggaatccaaggatatataaacagtagccaacttataaacccgctgacgaatatcgaaatcggtactgcttatctcgaatcggtttatcagcgctttggtaataatcggatactggccagcgctgcttataatgccggaccgactcgtgtagatcgctggttatctaacagtggtgggcgattagatgcgatagcttttattgaaagtattccattttctgaaacccgcaattatgtcaaaaatattttggtttatgatgtcttctacacttatttcatgggtaagtcatcaaatgtattgactgacgctgaatggcaaaggcgttattgatatgtagcaaactatgttatgctgatgtactagttaaatagtatgatgactgattaattatgacgacaaatcatctgacagacccggcactttcgccgcaagatcatgaagattggcaatgttttgtgacattactccaacaggcttttgccgaaaatctacagcatccgattttgcagttattattgacaccagatgaacggacagcactggctaccagggtacgcattatcaaggagttgatgagtggaaaaatgagccagcgtgagctgaaaaatgaacttggagtgggtattgcgacgattacgcgcggctctaatagcctgaaatttgcttcaaacgatgttaaggcttggttggaacagcaattactgaaatagcaggccgccaattgcggcctaggcggaatgctggtttaacgggcgttcagctctttataaatttcatgatgtacgggcactaaagccaatatcagagcttggtggtacacgctggtacgagtcaggatgccatcagtgaaaaagccaattgcaccctctttctgattgatgttatcaatgcctgtaagataagccatttcatggcctaattcccgaccttcgcggataccatcaagaattttctctggtagcatcagactggctgaacgagattctccgcgaatttgctgatattccacaaccatccaggcaaatgtcatatcgtcttcaatacctgcttccacaccgacccagaagtctgcttctgggcgaacttgtctggcagccatgacacgctggcgggcaccagtgcgggtttctgtgttaccaataggttgttgtgggacgctactgtctacattgatatcttcgattcgataagtacctggcccaaaaacatcatcaaaggcgagactaatggctttaatttttgcagggttggtggttgcagcaataacgtgatacataatagatgagttatcctttgaacgagtatttacgcagtataacggaaaatgaaaatgttacaggtatatcttgttcgtcatggggagtctgaatggaacgcagcacgtcgtattcagggacaatctgacagccctttgactgaaacaggcgaacatcaagccagattagtggcacaaagagtaaaatctgaaagtattacccatattattaccagtgaccttggacggacacgccgaacggcggaaatcattgctaaggtttgtggttgtgaaattattctggagccacgtttgcgtgaattgcacatgggggttcttgaacgcagaaatattgattcattaacatcggaagaagagaaatggcgtaagaaagtccttgatggcacacctgggggacgtatccccaaaggcgaatctatggatgaactggctgtgcgtatgagggctgcgctggagaactgtcgtaatctgcctgttggtagccgaccgctgttagtcagtcatggcatcgctttgggatgtttggttggcacaatactgggattgcccgcacatgctgaacgtcgtcttcgcttgcgaaattgctctctgtccagagtggattatcagcacagtccgtggctagcgtcgggctggattgtagaaacggcaggcgatatcacacatctggatacgcccgcactggatgaattacaacgttaatgttggataggaatgagatactgaaattcgatgatatgattcgccgcttccttgtctctatcattggtattggtaagataatatcgctcgatgtcgtatcctttcctacgtgtcaggtttagcattggcaggcaaatgccatagacggtaaacaggaaatcttgtaagccatctttggtaccgtagtaactaaatgaaacgtattctccagccggtaatgtaacaggttggctgcctgccacatcaaactgggcatattggggttctaccgctgttgtgtacaatacggtttgttcatcttctttttctggattgggagtcgcatgatgaaggccataaagtacaggaggtaacacttccgcatttttcagatagtatgtccagaaattgtggcgcatttcagtacaaaaactggaccattgttccagcgtataagagcaggtttgttctatacccaccagtgattgttcctttagtgtgagataggttgcttcgggaatatacctcttatccagcaatatgggggggcaaatacccgtggcgcaccactcctcactgagacgataaagtgcaggtgttttattaaattgttttttaaatgcgcgagtgaaagtttgttgggagtcaaactggtactgtaaagcaatatccagaatagggcggctggttaaacgtaaagcaacggctgcccgtgataaccttctggcacggatataggagccaatagcctggccggtaatgtctttaaacatacgttgcaggtgccatttagaataacctgctttagctgcaacattattgagtgataacggttgatctaaatgattatctagccaacgtaataaatcacgaatgatgccggtttgatccatacatctccttagtcgttaagaccagaaagaacaatataagaactcatactactaggctattttgtttgccacttgaacaggcttacagagtgagtaaaacgaatcattcctatgtattgcatatctgttctggtgtctgcgtgctgttggtgttcataatgtattgacaagcgtggcattcaacaataactctactagatataagcactaagtgtaaaacaagtcttatatttacaataggatacttgttcgtattattatttcactcattactttgtgaaattattctaataagtaattattgctattgggtggtattaccgcctatttggtatctcggcggtgaaattttacgctgaattaattaaggcatgagactatatatgttaaaaatcataaagatactcgtaacaacgacattgttgtgtttacctgtggcggctctggctgaagagattggctcggtagacactgtttttaaatttatcgggcctgatcacaaaattgtcgtggaagcgtttgatgatcctgatgttaaaaatgtgacttgctacctgagtagggcaaaaacaggcggaataaaagggggtttaggacttgcggaagatacttctgatgcggctatttcttgtcagcaggttggagagattgaactaacagacaagattaaaaagagcagcaaaaaaggtcaggtagttttccagaagcgaacctcattggtgtttaaaaaacttcaagtcgttcgcttctatgatgcaaaccgtaatgcattagtctatttgacatattccgataagatgatcgatggttcaccgaagaatgcgatcagtgctgtacccattatgccgtggaagccggtggaaaattgaggggcaggatgggttcctacagggatatcccatcctgtcattgttagagaccgatagttcaggttatgcttccaaatcaccacagaaacgatagccttcaccgtgaatggtggcgataatttccatcgtatctggcgtcgattcaaaatgtttacggatacgacgaatcgttacatcaacagtacggtcgtgaggtttcaattcacgacctgtcatctttttcagtaaatctgcgcgtgtttggattttgcctggattttcacagaaatgaagcatggcgcggaactcgctgcgtggcaatttatacggctcaccagccgggcttatcagagaacggctattgatatctaattcccaaccgttgaatttataactctcaacttggcgacgttcctcgctgacattactcagattcatggtacgagaaagcaggttgcgggcgcgaatagtcaattcacgcggattaaatggtttggtgatgtaatcatctgcaccgatttccaagccaaggattttgtctacttcgttatcacggccagtcaggaacatcaaagcaacatttgcttgctctcgcagttcgcgggcaagtaacaagccatttttgcctggaaggttaatatccataatcaccaggttaatgtcgttgtttgacagaatatggtgcatttctgaaccatcagtggcttcataaactatgtacccttcagcttcgaaaatgctttttagggtattgcgagtgacaatttcgtcttcaacaatcaaaatgtgcggggtttgcatggttgctacctagaatcgcttaaaaataaatcagaatgattcaaactactcttatctcaggatatttactggttattatttgtcatcactgaaattatagcccaaatcagtaataacattttattgatatgttttacactgaaagtaaaagttgcttttcctttggtgggtatatacccaaaaaactggttaaacagtgttatgttagtccattaacagcaatataacagcttgcaatgcatttaccatctaaaaaaactaccttttattgacgtacatcaaaattgattgtagcacgttaatattatttatattggttattttataccttgtattctgtcatgcaaatgacaaatttttgttaacgcatagagtggttttgtacgaaaaataatcccccatgagctgggcggtgaacaaaaataactgatttttacgaaaagataaaatatattgttaattttgttaaaaatggatttaacaactaaaagattgggttcagtaagaaatatttgtttgtcttgatgaccatgaaatgaattattccaatgttaaaaatatcaaaagcgtaaggttatttagagaaaatgtttgactttgcgcacaaattcatttaaccaatatagggtcgaacccattaaataacagacaggaacctatgcgaattatcagcctgaaaaccacaatgattaccaccaccgggaccacaggttgcggggcgggctgacgcatatataaaacagagaaaaaagcccgcatccaaatcagatgcgggcttttttttggcgcggaatcaggagaaaaatgttaatgcgagtacttaaatttggaggaacttcggtcgctaattaccagcgggtgttgagcgttgccgacattgcagagaaaaaattttctcaaggcggggtcgcgttggtgctttctgctccggcaaaaattaccaatcatttagtggctatgattgaaaaaacggtcgccgggcaagagatcattacccatatgcacgatgctgagcagatctttgttgatttattacaggggatggcacgggcgcaacccggttttgcttatgaacggttaaaaatgatggttgagcaagaatttgctcaattgaaacaggttctgcatggtatttcgttactgggccaatgcccggacagcattaacgcttccctgatttgtcgtggggaaaaactctctatcgctatcatggagtctgtattgcaggcacgtggtcacaaggtcacggtgattgatccggtagaaaatttgttggcacaaggtcattaccttgaatctacggtagatatcaacgagtctactaagcgcattgcttctctgaatattccagatgaccatattgtcctgatggctggatttacggctggaaatgataaaggggagctcgttgtcttggggcgtaatggttctgactattctgctgcggttttggcggcttgcttgcgggcgacatgttgtgaaatctggactgatgtggatggtgtttatacttgtgatcccagagttgtgccggatgcacggttattaaaaggcatgtcctatcaggaagcgatggagctctcttattttggtgccaaggtattgcatccacggaccattgcgccaattgctcaatttcagatcccttgcttgattaaaaataccgccaatccagatgcgccgggaacactgatcggcgatgggcaaaaagatgaaagtacgccggtaaaagggataaccaacctgagcaatatggcaatgattaacgtatcaggtccaggtatgaaagggatggtggggatggcggcaagggtatttgctgtcatgtcccgcaaagggatctctgttgtgctgattactcagtcatcttcagaatacagtatcagcttctgtgtccctcaacgtgaattggaacgcgcgcgtcaggcgctgagtgaagaattctatcttgagctgaaagagggggtgcttgatcctttggatgtgatggaaaatctttccattatctcggttgttggcgatggtatgcgtaccctgcgtggcatctctgcccgtttcttctctgcattggcgcgcggtaatatcaatattgttgccatcgcacagggatcttctgaacgttctatctctgcggttatcgataatgaagtggcaacaacagccgttcgtttgtgccatcagatgttatttaataccgatcaagtgatcgaagtttttgttgtcggcgttggtggcgtaggcagtgttttgattgagcagatccgtcgtcaacaaacatggttgaagcaaaagcacattgatttacgggtatgtggtattgctaattcacgggccatgttgacggacatgagaggtatttgccttgataattggccgcagtgtttatcagaggccaaagaaccttttagtttgagccgcctgatccgtttggagaaagagtaccatttgctgaacccggtgatagtggattgtacctctaatcagcaaattgctgatcaatacgctagtttcctgagagatggtttcaatgtggttacgccgaataaaaaagccaatacttcgtcgatggcttattatcatcagatccgtaaggcggcagagaaatctaaacgtaaatttctgtatgacactaacgtaggcgctggtctgcctgttattgagaacttacaaaacttgctaaatgcgggtgatgaattggttcagttcaatggcattctttccggttctctctcctttattttcggtatgctggatgaaggaatgtcactatctcaggcgacgttactggcaaaagagaagggttataccgaacccgatccgcgtgatgatctatctggtgtggatgttgctcgtaagctgttgatcctcgcccgagaatcaggttatgaacttgaattggatgatattgatgtggagcctgtactgccagcttcctttgataaccgaggggatgtggatgctttccttgaacgtttacccgctcttgatcaggttttcagccagcgtgtggcagaagcgaaagaacaagagaaagtgttgcgctatattggcgtgattgaagatggctgttgtagagtgaaaatcgcggcagtagacagcaatgatccgctttataaagtcaaaaatggcgaaaatgcattggcattctacacgcgttactatcagccgataccgctggtactgcggggatacggagcaggtaatgatgtcactgccgcaggtgttttcgccgatatgctgcgtactttgtcctggaaacagggagtttaattgtgattaaagtctatgcgcctgcatctattggtaatgtcagtgttgggtttgatgtactgggagcggcggtctctccagttaatggtgctttattaggtgactgcgttactgttcgggcagcgaagagtttcagtttgcgtaatgaagggcagtttgtggggaagttacctgagaagctggagcacaacattgtttatcaatgctggcaattattctgccagcatttgggcaaacaattaccagtggaaatgacgctggaaaaaaatatgccaattggttctggccttggctccagcgcttgttctgttgttgcaggtttgatggcactgaacgagtttgcaggtctcccatttaatgaaagccaattactggcaatgatgggggaactggaaggacgtatttccggcagtattcactatgataatgtcgctccatgctatctcggcggtttgcaactgattatggaacaaggagatattatctgtcagccagtaccttcgtttgatgagtggttatgggtgatggcctatccgggcatcaaagtttctaccgcagaagccagagcaattttacctgtaaaatattcgaagcaggatgttatcgatcatggacgttttcttgccgggtttattcatgcctgtcatacacggcaaccggcgctggccgccagattgatgaaagatgtggttgctgaaccgtatcgtacccaactgttaccgggttttgccaatgcgcgtgaaacagcaaaacgggtaggggcattggcgtgtggtatttctggttctggcccgacattgttttccatttgtaatgatatagcgaccgcagaggaaatagctgagtggctgcaacagcattatgttcagaatgatgaaggttttgtacacatttgccgtctggatctcgcaggcgcacgacaaatagggtaactaatgaaactgtataacttgaaagacaacagcgagcaggtgagttttgcacaagcagtcaaacagggattaggcaaacagcaagggcttttctttccgcaagatttacccgaattcagtcgtgaagaaattgaccacctattgaaactggattttgtcacccgcagcggttgcattctctccgcgtttattggcgatgaaattccgccagaacaactggcaacacgaattaagaacgcttttacttttccggcacctgttaccaacgtggaaaatgatgttgcaacattggaattattccacggcccgactctggcatttaaggattttggtggccgttttatggcgcaaatattggcacaagttgctggtgaacagccagtaactatcctgactgcgacttccggcgatacaggagcagcagtagcgcacgccttttatgggctaaataatgtacaggtggtgatcctctatccacagggcaaaatcagcccgttacaggagaaattgttctgtacattgggtggtaatattcacacggtggcgattgatggcgatttcgatgattgccaggcgttggttaaacaggcgtttgatgatcaggagttgaaacaggctctgtatctcaattcagctaactcaattaacatcagccgcttgttggcacaaatttgctattactttgaagcggttgctcagctaccggaagatcagcgtgaacaactggttatttctgtaccgagtgggaattttggtgatttaaccgcgggtttattggcaaaatcgatgggattgccggtaaaacgctttatcgctgccacgaatgttaacgatacagttcctcgttatctagaggatggaaaatggttgcctcatcagaccgttgccacgctttccaacgcaatggatgtgagccagccaaacaactggccacgtattgaagaactgttccaccgtaaatcctggccattgagcgaattgggatatggtgtagtcaatgatgacgtgactaaagaaacgattaaggaactggctaaacacggttatatctctgaacctcatgccgcggtggcttatcgtgtcttgcgtgatcaattacaagaaggtgaatacggattatttcttggtacggcgcatccagcgaaatttaaagagagtgtggagcagattctgggtgaggaattacccttgcccaaagctttggctgaacgggctgatctggagttgctatcccattacttaccggcagattttgctaagttgcgagctttcttgatggaaagagcacccaagtcattatgaaagtgggcgccgcacagatcatgcggcgtttattaattggtagtaaggtcttaatgttgttcagggcgcttaaataccagctcatttcctttggataacgattcatcaaaggcgtagccatccaaattaaactccaccagacggtcaatttgcgttaactgattctgaataataaactggctcattagcccacgggcttttttcgcgtagaagctaataatcttatatttaccgtttttctcatcgagaaataccggtttaataattttaccggctaactttttcgtattcacggatttgaaatattcatcggaagccaaattaaccaacacattatcaccttgttgttccagcgcctcattgagtttttctgtgatcaggtctccccaaaaagcgtagagatctttaccgcgtttattttccagtttgatccccatttccaaccggtaaggttgcatcagatctaacggacggagtacaccataaaggccagataagatacgcagatgattctgagcaaaatcaaaatccttattggagaaagattcagcctgcataccggtataaacatcacctttaaatgccaggatagcctgacgggcatttaaaggtgtgaaatcagcatgccattcgccaaaacgggcggcattcaagccggcaagtttatcgctgatacccatcaaactcgcaatttgggcaggcgtcagttcgcgacaaatacggattaaccgctttgattggtcgagtaattctggttggctatattcctccgtggcaagcgggctttcataatcaagagtttttgcaggtgaaatagtaataagcataatatcgtcccggttgttcagatgaggatactttaacagaagataggataataaagaattaatcacgacgatagcggaaactgtgtgcgtgatatctgtagggtaacaagctgataattttgcactccattttattgatcgatactgcacttagcgttaaaaatatttaaataatttatacccgtcatctttcaagctgcctctttgttggctgcactcactcaccccggtcacatagttatctatgctcccggggattcgctcccttgccgtcgcgatgcatcttgaaatccatagggtatatataaattaaaataaagttttttggcttattaaaatattaatttttgtgagtttgatcgatttttcttggattgtaatatagtaattatgctaaaagtgagaaagtgtacaatattaccagtttcttatttgattgaagtcggggaaataccattaatgaaatcgattggataaataaaatataagtgagataaggtatggagaataaaaataggctattatcctctgatataatatctatctttggtacaggaataagtgaaatagcgcttctttcgcttgtatattcaattaccaagtcggagatagatacgtctttaatggtatctgtaaggttaacagcgagtatattagtttttgtggttattggcgggctaactgctcggtttagtatgcgggctatttgtatttcttcggatttcttccgggcagtaacaatatttcttgctgtatttgtcaataatatatatttattatttttcatatcttttcttctatcatttttttcaggtttgaatatatcgataaggtcagtggcataccaggcatttgtcagctcagaagaaagagtggcttttatatcaaagcaacaattctattatgggttgctctctatatcttctccattgatagcaggttttttgataaatataacatcgatacgttttttatttattattgaatcaatgtgttttattttatcaattatatttctcttttttattggtgaatggggaaataaaataaagaaaaatgatgctgttatgaaatatggaggattagaatatatcatcaataatgatactcagagaaatatattattgttcaggataagtattttaactgctatggtgtcatatcaagtgatttcaacctatataatgacttctagctatacaacaattatctctttatttaatggattatattcattttctttttctgatttaattgcttatttttcctttttagcttctgtttcaatattatttggatcttatttttctagctactattttaatataagtaaattaaaaaaatctttctttcttggctctctattgattgcaattgggagtattctttgggctatgcctttgtcaagaattgttttgttattttatactttgggaactatgcttatttttatcggactttcttttttaaggatatctctctatacatcagggcaagagctgacaccagaaaaatactttgcgagaataatatcgtcttcggatgcaattgcaaggagttatcaatcagtctttggtattataataatatggttaatccctttgctaggaagtagtgtgttgtttgtcttttttgcaatgtgttctttgagttcagtttttgttgcaaagaaaataagcgctgatgttgagaataaactcacattgaagtaatttatgtagggagtaaagaggacctaatttagctatacccgtcatctttcaagctgcctctttgttggctgcactcactcaccccggtcacatagttatctatgctcccggggattcgttcccttgccgtcgcgatgcaacttgaaatccatagggtatattaagaaaataaggtggaaaatgaacatttctgcaattaagaataatttaacgaagcaatatagtaccttaattctgtttcctgttgaagttataattaacttattatcttctttttttatttttattataaaaattccttattgtaatgttgaaacctatcttgagtgtgattaatgatctaagtctgttttttatgactaaaaatcaggcttatgttctatcaataatatatagatcataattttgatccctatttagcaaacgatagatttttatattatcttaacaactcggattcagatgtgattatatttgatgagtttgattgcaggaaattaataaatagaattgataaaaataagaaaataatcgttgtctcacacatggaaactattggttcaatattgaacattagagaagtgatatgaaaagattggctacagagtgagtgactgcgcgtgatcgttttaccgccttgcagcaaggtcttaccgtgttattatcagtggatggctcaataacaatgccacaatttcacgcataacgatgagatatgacaaaatgaccgataaactaacctccctgcgtaaactgacaacagtagtagcagataccggggatattgcggcgatgaagctttatcagccacaagatgcgacaactaacccatctctgatccttaacgctgcacagattcctgaataccgtaaactaattgatgaagcaattgcgtgggcgcgcgaacagagcgattcccgcgagcagcagattgtggatgctagtgataaactggcggtaaatattggcttggaaattctcaaactgatcccaggccgtatttcgacagaagttgatgcccgtttgtcttatgactccgaacgcagtgttgccaaagctaagcgcttgattaagctatataacgaggctggtatcagcaatgatcggattctgatcaaattggcttcaacttggcagggtatccgtgcggctgaacagctagaaaaagaagggattaactgtaacctgacactactgttttcctttgctcaggcgcgtgcttgtgcggaagccggggtttatctgatttcgccatttgttggccgtatccttgactggtataaagcgaacagcgatcagaaagagttcgctccacacgaagatccgggcgttatttctgtaactgaaatctaccaatactataaacaacatggctatgacaccgtggttatgggagcaagtttccgtaattccggtgagatcttggaattggcgggttgcgaccgtttgactattgcgcctgcgctgttgaaagagttgtctgaagctcagggtgaagttgaacgtaaactgggttatgccggtgaaattaaagcgcgtccagagccattgaatgaagctcagttctattgggaacatcatcaggatgcaatggcaacagaaaaactggcggatggtatccgtaaatttgctattgatcagggcaaacttgagaagatgatctctgatctgctgtaatgataggcgataaactattcttttagcgttaaaggcggcataattggccgcctttttgctatttagttaattgaggtttatatgaatgaattgcgcattggcttggtatccgtctctgatcgtgcatcaagcggtgtttatcaggacaaagggattccggcattagaagagtggctgaaaagtgcgattaccaccccttttcagatagaggctcgtctgatcccggatgagcagatcatcattgaacaaaccttgtgtgagctagtggatgaaatcggctgtcatctggttttgaccactggtggaaccggccccgcacgccgagatgtgacgcctgatgctacattagcggttgcagaccgtgaaatgccgggttatggcgaacagatgcgtcagattagtttgcaatttgttccaacggcaattttatcccgtcaggttggtgttatccgcaagcaggcgctgattttgaatttgccggggcaaccaaaagcaatcgcagaaacgttggaaggcttgaaagacgaaaatggcaaagttctggtatccggcatttttgccagtgtgccgtattgtatccaattgctagatggcccgtatgtggaaaccgatgataaggtagtcgcggcttttagaccgaaaagtgctcgtcgttgaataatgagttgattgtagaaagaatcaaaaaatcgaacttttatctgccacctatcgaaaggtaatttcaacattttaagcttataattaatttggtatgttgattagtttgtttggaataaatttcggggtgaaaaatggaacggctaaaaaaagtaaagattggttttattgctggtttggcattggttatgagcgcaatggcaccaacggtggcgttagcaatggagtcaaagaccacggtagctcagttgattaatcagcgtctctcttacatgaaagatgtggcaggatacaagtctgaaaatcatttacctgttgaagttttggctcaagaagagaaggttcttgctaaatcaataagtgaggctgaatctttcgggttaaatggggaatcagttagaccattcgttataatccaaatgaatgcggcaaaggcgattcaatatcgctatcgagctgattggttgtcagttcctgaaaatggttggcaactgaagccgctagatgatgttcggattaaaattagcgggttgagtacggaaatcctccaacaaattgcaaccttgctcaaagccggagaaaaaataagcgcttctgacaaagaaatgtttatgaagaatattcaacaacacaatttaaaggattcggataaacagcaaattttcgcggcgcttgaaaaggtgaaattaaaataaatcacaatccctcgctctttagcaagaaaagccggtctttttgaagtgagcctttggaaatggatttgctttacggtttttcaagctaccagcggcacatacagcaacaatctatttcggcatacagataactctgcccgatatcacgagacactgataatgttgtacagggcttgatacctctcagattaaagtggccttatagtttttcactgaacgtcatatgttaaaaatcccctacgggcgggcgaacttgcgccttatatcttattgatggtaactcctcgaaagttaaatttgacgtatacagcgtaaaagctagtgtggtgataatttgttttttaggttgacaaaatcgacattattcatgacattcatgcatattggcatgacaaaaaatcatttttgattgtcattgtatttaaggggttggttatgaatatcgttgctgaggacattgttgccctcatagaagcgtctttggatgctaattatacagaagttagaagtgtcagtaatagaatagctaaatccatcagtgctgatgatatggatgttgccaaaaaaattaaatccatagtaagacgtaagggagttccacttcgtagttcgggatatagtgatagtttacctgttgaccctaaatcaagaatgcctttaattgaggaacaccagtggtcagtgacccctatttttttgggcgagtctgaaaatattacttttaatgcttttattgaaagtgttaaacatcaaaaaaagctaattgaaaatgggttatcaggaagattgggattactattatcgggtccaccgggtaccggtaagacattgattgctggtcatattgcttctcaactaaataggccgttattcgttgtcagattagattcagtaatatcatcattattgggtgatacagctaagaatttaaggcaaatttttgattatgtaccttctagaaacggcatattgttattagatgaggttgatgcggttgctaagatacgtgatgatcggtacgaaataggtgagcttaaacgtgttgtgaatactttgatacaaggtttagattcactggatgatagcgcagtagtcattgcggcaactaaccacgcagatcttttagaccccgcgatttggcgacgttttccatataaaattcgctttggtatgccaaaccttgaagttagggagtctctttggaatcatttccttttccaagacaagggtatatcaaaggagttaaaagcactatctataatatcagacggattaagtggagcagatattgaaactatagcaatagcagcgagaagacaggcaattttgactaattcgaatattgatattgtagcggtcattcaagcaataattgagggtgactcacataactcgattataccttacagagaagggttaagttcggataataaaaaaagcatcgttaatttgctttctgaaactaaattgtttactcaggctgaaataggtagttttttgaaactaagtagacagacaatttcaagctatctcaaggaataggaattatggctgagggtgttagaagtcctttattaaatcctgtactatcttttttagataagccagttcccaatacagtgagtggtggtgggaaaaattctaaaggtataatttgggcgcgattagatactcaaaaagagaagctatcgaaagagcttagatgtattagcgaagatgatggtattgtttcccattcaggtaaaattcatctattagctaaaatgtttgatgattctcttgcaccatcttggactcctgatgatttatttgaaccagatgatttaacaagaatagttgctccggcttttgatggatacctagtcgaaatttcaggttctagaatctctagtttgattgagaaaatagaaagagcgaaaaatggtcgaattaaagtcgatatttctcgtcttgaaagcattattggttttgataaaaaccaagtattacgaggaagaaaggaaaaagctgtttttgaagcgttcgatgatgtagaaaaacagttcaacgtttgggttttaccattccatgataaaaaagcaagagtatctgttaagaaagaacttgaagagtttgctaatcagaagattattggttttggtcattctaaatttgataatgtttttaaaaatgaagaaatacaaaaaaatggaaatagatattttccaagaaaattggatgaatatttaatcgacggaatattatcatttaccacagtaataaataatttagagaattttaataagttaattagctctggtattgtttatagaattgagccggtacatcatgtttcagcaaaatcagtgccaccaggtagcggtaaagaaccaatacctaatttaacccgaattctggataagaaattgacgagaagcctgttccaggagcaaagttttggtgtgcaccaaaaacagctccgaggggggaacaggctatggacaacttagttgaaattttctgtgatgtcgatgatttttgccgttttttcatccctcaatgggaacaattttgtctcgatagcgggcatcgtttacgccgccgacaaggtcatatgtatcccagtgaaatcatgaccattttgatcctttttcatatgtcgcattaccgtgattttaaacatttttatctagaacatatttggaaatatcaccataaggattttccaaccttgcttagctatcctcgttttgtcagtgtggctccttccgttttggtgccattatgcagctatctgactcaattaaaagggaaacccacaggcattgcttttattgattccacccgtttgagtgtctgccataacattcgcatccctcgacataaggtctttgcggggatagcaaagcgcggaaaaaatttcatgggctggttttacggtttcaaattacacctggttgtcaatcatcagggtgaaattctcgcgcttaaagtgactccgggtaatgtggatgatcgggaacctgttcgtgaattatcaaaagaattaacgggttctctttacggtgacaaaggttacctcagccaggaattggcggacgatttagctaaaaccgatgtcactttcatcacgaaaaaacggcgtaacatgaaagcgagtatgcaagctgagtgggataagataatgttaaaaaagcgttttatcattgaaacgattaatgggcaattaaaaactctttctcaaatagagcattcccgccaccgaagtataaaaggctttctgttgtgcgttttaggtggattgattgcttactgccttaaattgaagaagccatcactgaaagttttctactcagaagacgatttttcaatgacggattaagcagaattcgggttaatttatctaacttgaaaaatatcccaacagtagtaattgttgatggcggttgctctgctgtttcttatttaccttttaacgtaatgagtattactccattagtagatcaacatgatgcagatttaaggcatggtaataaggttacttcagtaatttgccaaggatctgcgtggaataataatctcgctttacctgagttggagtgcaagtttattagcgttcaagcaattaataaaaaaggagtctctattcaaccaacgaccgaacaatttattaactatcttagagatgttgctaatgagacaaaaggggtatctcaggtatggaatctttcatttaatgagagtgagccatattattcgaatgaggaaattagttatttagggcatgaagttaatcgaatttcccgtgaatttaacatattaccaattatttcaatcggtaatgtaagcagatcaaataatataagattgtgtcctcctgccgactgtgaatctgctttaactatagcgggacgatgtgcggatgaaaatggcatggcaactacaccttgctcgatgagcttgcgagggcctgctccggcagggatgaaaaagccggaactatcttggttttcaacgttacgaatgattggtggggtaatagatactggaactagttatagtacacctcttatttcatcaatagcagcacatgcgtttaaaagtctaaaagaacctactcctgatttagttagagcgttgttaataaataaagctgagaggtgtgcacatgatttgcgtctaggttggggatcaccttggaaagaaggtaataaccttccttggtattgtgatgaagggacagtgactctcgcttggaatagtaaaattcgtgcagggtttgcatattattggaatgatattcctctacctactgaaatgttggaagatggaaaaattaaaggagaaataatattaacagcaatattaaaacccttggtttctgaactgggcggcgaaaattattttgctactagactacagtgttctttgcagagcattagtaacgacggtaaagtaaaaaatcttcttggtactatgaaggaatctaaagaaaaagaacttcagtctcgccaagagttagctaaatggagtccgataagacatcatggaaaatctttttcaggagtgtccgttgataatacgaagttaagactctatgctcgaatttttacccgtgatttatatcagtttgatatgtcatcacaccatgaactctctgaacaagaggtatcatttgtcttaacttttaaaagtcacgataaagattctggtatttataactcaatgaaacaacgtttaggaccaaaagttgaagttgggataattgagaaaaatattgatattgataatacaatataaacacatagtatcccctgtattagctgcttgatacaggggcgaattagatattttttatctatctattatatctatgtaaattaactgttattgacgtgtcaatcctcgcagatgagaggctttttcgtttctatacccgtcatctttcaagttgcctctttgttggctgcactcactcaccccggtcacatagttacctatgctcccggggattcgttcccttgccgtcgcgatccatcttgaaatctttagggtatatatttaaattttttgtgtaatcgttgatatttgcgtgattggtatctcagattagtgttaatgccggttgttaaactgtgtccagcctgagtgttaataaagatttccacagccggtgttgaaaagtatagattaaggtaagagactgccatgccccaaattgcattcaatcctattgaacatccccatcgtcgttataatccgttaaccgggcaatgggttttggtctctcctcatcgggtgaaacggccgtggcatgggcaggatgagcagccattgatagacaatattccgaactatgatgagcaatgttttctttgcccatcaaatacacgtatttccggtgataaaaatcctgcttatcaaggagcctttgtttttaataatgatttttcggctttaatgctcgattcacctgatttaccaccatcatgtcatccactatttaaagcgcagggggttagaggattaagtcgcgtgatctgtttttctcccgatcacagtaagacattgccggaattgccggttaaacacattcgtcaattgattgatacctggaatgagcacattgaaatactgggtaaggaatatctttgggttcaagtttttgaaaataagggtgaagcaatgggatgttctcagcctcatccacatgggcaaatctgggcgaatagttttctgccaaacgaaattgaacgtaaagataaacaactgcgtgcttattaccaagaacagagttctaatttattgatggattatattcaggctgaattagctgatggtgagcgggttgtggtcgatacaacccattggttggcggttgtgccttattgggcagcatggccctatgaaaccatgttgttacctaaagttcatgtgcgtcgaatgaatgaattaacggatcagcaacgcgatgatttggcggtcgcgcttaaaaagcttaccagccgttatgataatttatttcatagcgcttttccctattcgatgggttggcattttgcaccgttttttgaacaaggcgctgatattgaacattggcaactacatgcacttttctatccgccattattgcgatcggctactgtgcgaaaatttatggtgggttatgaaatgtttgctgaaaaacaacgtgatttaacggcagagcaagccgctcagcttttgcgtgctgtgagcgatatacattataaagagcaacaatgttcattatcgagtggctgatactatatttgagagtaatgtgatgaagactttaattaatcgcgttgaaaatgtttttgatttagtatttcattatatgccgacacatattattcaagcgccgggtcgggttaatttgattggagagcatacggattacaatgatggctttgtattgccctgtgctattaattaccaaattgtggttgcggcggcgaaacgagagggtaatattatccgcgttgtttcggttgactacggcaatcaattagatgaatttgatattagccaacctattacatttcacgaaagtaaaatgtgggccaattatattcgcggtgttgtaaagtgtctgctcagtcgtggctatatatttaacggggcagatattgtggtagcgggtaatgtgccacaaggggcgggattaagttcatcggcggcactggaaacagttattggtcaaacaattaaaaacctttaccacctagtcattagccaaacagaaattgccttaaatgggcagcaagctgaaaatgaatttgtcggttgtcattgtggcattatggatcaattaatttccgcgcaaggtaagaaagagcatgcattattaattgattgtcgtcatttaaccgcgcaagctgtatctatgccgaaagatattgcagtcatgattattaattcaaataaaaaacgggaattggttggcagtgaatataatatccgtcgggctcaatgcgaacaagcagcggcattatttggggttaaggctttgcgagatgtggcattagatgaatttgaaaaacgtaatgttgagcttgatagcatagtggctagacgtgcacgtcatgtaatcacagaaaatgaacgtacacttctggcagcaaaagcgttggcagagagtgatatgccattaatcgcggaacttatggcgcaatcacatcagtcaatgcgcgatgattttgaaattaccgtgcctgaaatcgataccttggttgatattgtgcagcaagccattggtaaacaaggaggagtgagaatgaccggcggtgggtttggtggttgtgtggtggctttagtgccacaaactttggttgatgtggttaaggcagcggtagagcaacactattttgcgttgacaggtctgaaagagactatttatgtatgtcaggcttcggaaggtgcagatttggttgaaacatggtaggcaataaaatgatagatgcttactttgaattattgaacgcttcaatgacacaagatattgctagggatggaaaaaaagcaaatcttgtctgcctttccaatgcctcgggtttttctattgtgttgatggacattggtgcatcttggttaagttgccgtgtgcccttaagtggagagaaaagagaggttttactgggtattgccaccttaaaagatttttataaacagaccagttacttaggtgctaccgtaggacgatacgccaatcggattgcaaatggatgttttaatcttgatggtaaaacttatcaattacaggtaaatcaggcaggaaattgtttgcacggtgggattgagggttttgataagcggcgttggacaatcactgcaagagatgcttattcagtgagttttacattacagtcaccggatggtgatcaaggttttcctggtaatgtcgttgtgaccgttcgttacgtattaaccaatgataatcacgtaatcgtggattatttagcccatacagatgctgcgacgcccattaatttgactaatcacgcttattttaatttattgggggcggatgctgggaaaacatgtttatcgcatcatctagaagtgaaaagtgacggctatttaccgattgatgaaaatggtattccattgggccaactggctttggttgataatacgggttttgattttcgaacacctaaagcaattaacagtcactttatgctggataaacagcagcaaattgtaaatggatatgatcattcattctggttgcaagcaacccgtttggacacggattatgcaatctcagtcacctcccctgatgaagcaatcacaatgaaaatattcaccacaaaaccggctgtgcagttttactcgggaaattggctaggtggaacgcctaaccgtgatggtgggcgatatgagaactatgcgggaatggcatttgagccacaatttttgccggattctcccaaccatcctgaatgggagcaagagagctgtatacttcgtcctaaccaacgctataagcaccgtacttgctatcaattcgaaatccataatgcttatacacattgaaaaaaataggatagcaatacactcataacggactggaagaggggaaaaatttttaccttcttccaacccacggtttattacggttttatctcgccaatgggcagaatagtgcggccatactgctcattcagcacttccgccattgccagataaaatgcgctggcaccacaaattatcccttcatagccggcaatcgtcagaagagtggtattgccagtaaagttgccaatcgctaacagagcgaacaacagtgtcaggccaccaaagataaactgtagtacgcggttagccttgaaggtgccaaagaacataaacagagtaaacaccccccacaggccaagatataccgctaaatattggctgctggtggcttctgccagtcccattttgggcagaaataataacccaaccagactgagccaaaacaacccataagaggtgaaagccgttgcggcaaaggtattgcctttcttatattcaaaaagccctgccaatacttgagccaggccgccgtagaaaatgcccatactcaggataacggatgctagtggaaagaaacctgcgttatgcagattcagaagaatggttgtcatgccgaagcccattaaacctaaggggccggggttagccaattgattcgcgttcataagtcctctgaaagaaagtcatatacccgtcatctttcaagttgcctctttgttggctgcactcactcaccccggtcacatagttttctatgctcccggggattcgctcccttgccgtcgcgatgcatcttgaaatccatagggtataaatagcaaagggggcgaatcataatgatctgtcagcaaggaaacaatgacctttgaaataataaaaaggttttttttcgcatccccccttgatgatagttttaacgaccccatcttataatcaaccgcagttgctaatcgctgccctaatacagtcagtgtatataagcaagggtgaggaatcgcgtagaggcataaaaataggtgccattgaaaagcagagagttatcctcatattggttagcaacttgattgattacgaatttctttggaggcgtttagatgggtaaaattattggtatcgacctgggaactaccaactcttgtgtagctattatggatggcacgacagctcgtgtgctggaaaacagcgaaggtgatcgcacaacgccttccatcattgcttatacccaggatggagagactctggttggtcaaccggctaaacgtcaggctgttactaacccgcaaaatacattgtttgctattaagcgtctgatcggccgtcgtttccaagacgaagaagcgcaacgcgatgtcgctatcatgccatacaaaattattgcggcagataatggcgacgcatggctggaagtgaaagaccagaagatggctcctcctcaggtttctgctgaagttttgaagaagatgaagaaaacggcagaagattatctgggtgagccagtgactgaagcggtaatcaccgtacctgcctattttaacgatgctcagcgtcaagcaaccaaagatgctggccgtatcgcaggtctggaagtaaaacgtattatcaacgagccaaccgctgctgcactggcttatggcttggacagagaagtaggtaaccgtactatcgcggtttatgaccttggtggtggtactttcgatatttctattatcgaaattgatgaagttgacggcgaaaaaacctatgaagtgctggcaaccaacggtgatactcacttgggcggtgaagacttcgacagccgtatgatcaactatctggttgacgaatttaagaaagatcagggcattgatctgcgtaatgacccactggcaatgcaacgtctgaaagaagccgcggaaaaagcaaaaattgagctctcttctgcacaacagaccgatgttaacctgccatatatcaccgcagatgcaactggtcctaagcacatgaacatcaaagtgacccgtgcgaaactggaatcactggtagaagatctggttaaacgttctatggagcctgtacgagtcgcattgcaagatgccggcctgtcagtttctgatgtgaacgatgtcattctggtgggcggtcagacccgtatgccaatggtacagaaagtggttgctgacttcttcggtaaagagccacgtaaagatgtgaaccctgacgaagcggtagcaatgggtgctgcggtacagggcggtgttctggccggtgatgtgaaagatgtcttgttgctggatgttacaccactgtctctgggtatcgaaacaatgggtggcgttatgacttccctcattgtgaaaaacaccacgatcccaaccaaacacagccaggtgttctctacggcggaagacaatcagtctgcggtaactatccatgtgttgcagggtgagcgtaaacgtgccggtgataacaaatctttgggccagttcaatttggatggtattcaggcagcacctcgtggtatgcctcagattgacgtgacttttgacatcgatgctgacggtattctgcatgtgtccgctaaagacaaaaatagtggccgcgaacagcagatcactatcaaggcttcttccggtctgaatgaggaagaaattcaacggatggttcgtgatgcagaagcgaacgcggaatctgatcgtaagtttgaagagttggtacaagttcgtaaccaggcagatcaactggttcacggcacgcgtaagcaagtggaagaagcgggtgacaagctgccagcagaagataaaaccgcgattgaaagcgctgtagctgagttggaaaaagttgctaaaggcgaagataaagcggatatcgaagcgaaaattcaggctttggttcaggcttccgctaagctgttggaaattgctcagcagcaggctcaggctggtgcaaccgcagatgctggtgacagtgcgaagaaagatgacgatgttgtagacgctgaattcgaagaagttaaagataaaaaataatagcccttagcgggcgcggtgacagttagatgatgataactgttgctgattaaccggcacgggcgttgagggaactctgcgcccgtgcgcgcatgttaagggtaaaataagagatggcgaaaagagattattacgaggttttgggggtttccaaaacagcgagcgaaaaagagattaaaaaagcctataagcggctggcgatgaaatatcatcctgatcgtaatcagggcgataaagaggcagaaagccaattcaaagaagttaaagaagcttatgaaattctgacggatgaccagaaacgggctgcttatgatcaatatggtcatgctgcttttgaacaaggcggcatgggcggcggcggagctgattttagcgatatctttggtgacgttttcggtgatattttcggtggtggtcgtcgtcaacagcgtccaagccgcggtgctgatttgcgttacagcatggagttgacgctggaagaagcggttcgtggtgtgaccaaagagatccgtatcccgacactggaaacttgtgatatctgtcatggtagcggcgctaaagcaggaaccagccctgtaacctgttcaacctgtcaaggtgctggtcaggttcatatgcgtcagggatttttcaccgttcagcaaccttgcccacactgtcatggccgtggtcagattatcaaagattcttgccataaatgtcatggtcatgggcgagttgaaagatacaaaaccctgtctgtcaaaatcccggcgggtgtggataccggtgaccgtgttcgtttgagtggtgagggtgaagcgggggctaaaggcgcacccgcaggtgatttgtatgttcaggtacaggtgaaatcacaccatatttttgagcgtcaagaaagtaatctctattgtgaagtgccggttaactttgcaatggcggcactgggtggagaaatcgaagttccaactctcgatggccgtgtgaaactgaaaatacctgcggaaacccagacaggtaaaatgttccgcatgaaaggcaaaggtgttaaatctgtccgcggtggtgttcagggtgatttattgtgccgggtagtggtagaaacgccggttaaattaaatgaaagacagaaagaattactgcgcgaattgggtgaatctttcggtggggccggcgaagaaacgaatagcccacgttctaaaagtttcttcgatggcgtaaagaaattttttgatgatttgaccaagtaaatatcttcacataatagagctggattgttaaataaagctcgaattatgggtaaaaagtcctcgttttggatgaggactttttgttttggttaagaattataaactaaacgtaatttgtgtgagcaaattataggcatcatcctcttttggtgtcactgatgggtgatgagtatacgataagctattagtccaatagatgccgttgtaaacacgatagctatacgctacagaagcggttgcactataactttcagcaagttgaccattgcgagcaaaataattttttgcatcgtcgctgaacttattataggccagaccaaaagtaaccatatcgtttggacgcgaatcaaatggaccaatgctgaacagtgataatgaaatgtcggcattaaacaggttacgatcctttggcgcatagttggctttaccgtcaatataccagccacggaaaggcattgacgtatccggcttggttatttggtgggtagcggcgatataatgagagtaagtgtaattttcatactctgaattgttatagttaaaataaggggttttattgaacaccgatccaccccgaagccagatcatattttccgtttcattggcattaacacgataacctaattcgttgatgactaaggttcctgcactgggaagtttccagcgcagaccataggtattatattttgaatcggtttttaaaccttctgagctttgacttctggcaacgccaatgtggtcataccaacgtttattttccgataaaaaccgaatatctattgatgggcttggtttgctaatggttagtccagcttgggacaacatcacactggttggccctagcgctgatgatgctgtactgctacccaaaaataagccataaaaatgggagagtagtgtcgtatagccataatttaatatgactcgatcattcaataagggttgattaatggaaaaggctgagacaaaaggatgtccatcttgaccattatttttgaagttattataagcataggttaaacctaaacgcagttgtgctttatcagtgaaaccaatccgtgataaatcataagtgagttctgtcgcggcgatattaccggtagttaagtgctgtcccatataattgggactaggcgtatttttccagcttcttgatatatcgtaggttagattagtaagtagttgaaaatttgcataaaagccacgatctgccatctcttttctaaggccgccccattcaggaaataccgtatcgcatgcagatgaaaccgaaggtgtttctggtcctcttggtaaaagggtatcatacgagtggcagttattttccgctgctacagtgacattgttataaagcaaaataagtggaatcgtgagtaaaagaaatttattggttattttcattttctacctccggggcttgaagggtattaccgtgactgctgatcaccgctttataccaattaaaactttttttacgccgccgttctaatgttccattgccttggtcatcacgatcaacataaataaacccataccgttttgacatttctgcggtagaagcgctgaccaaatctattggcccccatgaggtatatcctaataactgaactccatcttcaatggcttcccgtatctgaaataaatgatcgttaagatatttaatacgataatcatcaataatagagccatcgttttgaataacatctctggcgcccaaaccgttttctacaataaacaggggtttttggtaacggtcatatagcatattgagaagatagcgaatgcctttaggatcgatttgccatccccattctgagctggacagataaggatttttcaccggattaatgatattccccgaggtcttgataatctcaaggtttgttgttgcgcagctactcatgtagtaactgaaagagaggaaatcaaccgtttctttgagtgctattttatcttcatctgtgatatcaagtgtgatatttttttctttaaatagacggggcatataagatggataatatccacgagcttgtacatcaaagaagaatagccattcacgattctttttcaatgattctaatatatcatcgggatgacaagttaatgggtaataaggggccgctgccaccatattacctatttttgcatcaggaataatttcatggcaggctttaactgcgttggcactggcaactaattgataatgtagtgcctgataaatatcttgaattttactgttttctggtaatcctgcacctgtaaaacaggagaataaagacatattaatttcattgaatgtcagccaatattttactttatgctggtaacgttcaaaaacagttctggcataatggtcaaaaaatgcaattgttttccgatttccccaaccaccatatttttttactaagccataaggcatttcaaaatgagaaagcgtaatgagtggttgaatattatattttatcatttcgtcaaacaggcgatcataaaaagccaggccgttttcgttcggtatttcttcatctccctcagggaatatacgtgtccaggcgatggaggttctcaggcatttaaatcccatttcagcaaatagcgcaatatcctcaggataacgatgataaaaatcgataccaatatccttaatatgaaaatcacctaaattgcgttctatgctgtgaccaatgacgccgtggggttgcatatctgaggttgataacccttttccatctatttgatgggctccttcaacctgatttgccgccagcgctcctccccaaaggaagttatttggaaattgttttttcatgattttcctcttgttaattgctcgttaaacttggaagatatcctcttaatatgattcttcctctcagagtttaaattaattttttgtaccggatgttattggtgaaacttttacttctgatggtaaaccgaataaataggttgcgatacaagaaaagataaatgaacctaacgaacctaatatgacactccagaaagcactatctatgccggtgggagaaataaatgaggtgaacgcaaagatacccatgccgccaacgttatatgctgttcctgaatagaagccgacaattgctccgccaagcgccccaccaatacaaccgataataaatgggcgttttagtggtaatgtcacaccgtaaatagcaggttcagtgatgccaaagagacttgatatcagtgcagtacctgataatgttttcatattcttatcacgtgtacgtaaaaatacccccagagttgcacctgcttgaccaaatattgctggctggagcagtggggagagcatatcttttttctgggtcatcatgttattgatcattattgggataagtccccaatgcagaccgaaaataacacaaacttgccacaatgcgcccatcaggagtccggcaatgaccgggtttaattgatagaagaagagatatccggcagccaggccattactaagctctgttgctacagggccaataactagaaaagttaaaggaacggtaattaacaggcacaggaaaggtgtggcaaacagtttgacggaggaatgaaaccagctattaaacttcttttccagcaagcagctaaaccatgctgataagataatgggaataacggttgagctataattaatgaaagagataggaatgccaaggaaattgaggtgaacagcaggagtcgtttgcgaaagtttaaatgcctcggtcatggtgggataggttaaggcggctccgatcaccatagtaataaaagggttgcctccgaaccgtttacctgcggtatatcctaataaaataggcatgaaatagagcatggcatcgccggtagcgtataaaattttataggtcccgctgtctatgctcatccaattgaacacgtcggataaagcgagaatacctttaattaatccggcggcgaccaatacacctaatagcggggtaaaaatactggaaatgatatcaatggtgacatcaagaatacgttttaaaccttttgcattatcttgttttatcccttgcggtgacgttacactttgtttaacttcggttttttctgtattatcttgtaagtatctattaatatcgtcgtaaacatcccctacgtgactaccgatgacgacctgatattgcccaccactctctactacggtaataattcccttagtctgtttgagtaattcgctattggccagactgctatctttaagtttaaatcgtaaacgagtagcgcaatggaccaggctagatatattctctttcccacctattgcgctgactattttctttgccagactttcgtatctcattagacttccccttcatttaatacgctgaaaacagcgaaagaccgaatttaaggcaaaaaaaaacctaacccatcatctataatcgccctggaataaggggatcgtgacgtgatggattaggttttgcccgacgccagtcgcaactaagtcggtaacaagcctatatcagttggttaaaagctagttattccttgtgatacttgcaagtcattaaatataattttggtaaaaatgtgatacttatcataaataccttgggtaagttgggtatgttgctgtgccgttgactttgtaaaaataatgccttagcctgaaagataacataatgaatatagtgtacaggagtgttactgataagatcaggcacaaccaggtcacaaatatatttcacctattttataggcttaggttggagcatatataccctaaagatttcaagatgcatcgcgacggcaagggagtgaatccccgggagcatagataactatgtgaccggggtgagcgagtgcagccaacaaagaggcaacttgaaagatgacggatataatagtttatcctgtaaggtatctcttttgttaacgatagtaaaactcataaataataatgttgttcttgccattgatgagaataataatgaagttattctaatggataagggcataggttttaatagaaaaaaaggcgataggctgaatgttcaagatgttgcgaaagttttcactgttgaaaagaacgatagaattaatcaaattattgcgactattccagtctcagttatagagctaaccgagaaaattatcgcattagggaaagatcttcttggcaaatctctcaacgattcattactcattactttgtcagagcatttaaactttgcatttgagcgtgtgagtaaaggatatcagattggtaatgtcttacaatgggagatccctcatctttacccgttggaatatgaagtcggtaaacaggcacttatctatattaatggccagattgaaaaaccattaccgccgatagaagcctcattgattgccttgcattttgtcaatgctcaatatgaagggcaaacgatgggagatacattaaaattaacgaatttgattaataaaacggttaagctcattcactactattttcatgttaaccttgatacaacctcggtaaattactctcgttttattacccatttgcgctatttcctgattagacaaaataaaaatgagcattcttctgcgattgagatggatttttctctgcaagagttgatagaagaaaagtatttcaaaagctacaactgtgcagttaagctaattaaatatctgagggagaaatatcaatggaaagtgcccgatgatgaattgatttatttagtcattcatatagaacgggtggttaatgatagttataagagcagggaattataagtaagtggagcgtcaaaataagtgtcaattgctaatggtattaggtgagtatatttatacccgttatctttcaagttgtctctttgttggctgcactcactcaccccggtcacatagttatctatgctcccggggattcgctcacttgccgtcgcgatgcatcttgaaatccatagggtatatgtgatttaggcttttttcaggtaatagattagaggtggaggataaaatgagagatgaagattttgcaaaagagatcattatatttactggcggacaagaaaatataaataaaagttggcattgtgttaccagattgcgttttaatattatagatgatagtaaagtagatattgttgcgatcagaaaaatgcagggggttattggggcacattttcacagcgggcaattacaaataattattggtaatagagttgttgaaatatttagtgaaataattaagcagttaaaagaaaatgaaggaaatcattatggtctaaaaaagggtttcattagtcatattcttgacgtcatttcaggcatatttgttcccgtattgccggcaattgtaggggcgggtttacttaaaggcgggttaatttttttctatatgatggattgggtttcagagcagagtaatgagtataagttattatatattctttctgatacacctctctattttttgcctgttcttttggctttttcagcagcaagaaaatttaaaacaaatgaatttattgcagccacattagcgtgtattttaatttatccaacattatctcatcttgtgagcagttctggtggcggatattttagtgtatttggtattactattcccgctaatcattatagttatactgccattccaattattttaggggtttggttgctcagttatattcatcgatgggtagataggtttattccaacggtattgaaaataatacttacaccattattggtcttattaatttccgcacctattttattgattattgctgcaccgttgggaaatacaattggtttgtatcttgaaaagtggcttttaatattattttccgtggctggaccgtttgcgggattattgttaggtggattgatacctattttagttattactgggatgcattatgcctttttgccaagtgtttttgctaactttaagtctcttggatacgattttatgttattacctatcagttttgcgagtatattgcacaagctggtgcgacattagccgtcgcaattaaaattaaagataggcaaatgaaatcattagcttattcatcttcattctctgcttttttaggtgtaactgaacctgcaatgtatggcgttacgcttaaattaagaaaacctttttatgctgcattaatgagtggagccgttggtggcgctattataggtattttctctgtgaaaatatttgcttttagtgtaccgggcttggtgtcattacctttttatatacaaaaagatagccataactttatttttaattttgctgggcatttttagtagtttcttagtggcatttatatccactttattaatgaaattagaatctaatgttgattctatagtattaataaagccacgcttttcaaaaaagaagaaaatcatattacgttctccgatgaccggcacaacagaatctctctcaagagtacctgatgatactttttctgaaaaaattattggtgatggtattgctattattcctaccgaaggtgtggttaaatcgccttttaatggcaaggtttcaatgattactccgactggacatgctattggtttaatttccgatcaaggagtagagttattaattcatattggtattgaaacggtaggtttgcaaggtgcaggatttaatttacaaattatagaagggcagagagtggttgccggtgaggtattagttaattttgatctggaatttcttcaagagaataaaattcagattatatcgccaattatcgtcactaatagtgaggaatatcactcaataatgccgactaaaagaagaagagttattggatgtaaagatgatttgttggttattaatcgatgttgatttgttttccaagtaattagtgtatgttgataatattcttaatgctttttttatttaaagattgcgatatgaccagttttaatacctgttaattattcatgctgttttctcgttattattgtcttattttatcttttctgtcgaattcttagaaattatctagctatataaattctgaaaaaatatatttttcataatattaagtcatattgaatactaatatttgaggtgaaaaattaaacgatctacattgcaattaaccctaaaagggctactttttattgtgtaataatataaggtagcggaatggccgcagcctgacatccctaaaaaggaagaacgacgagcactactaaaatgactactgctgaattcgaaaaaatccacgctgaaatagcaaaattaatggcagaaacgacaaagataaatcgtgaagcgatatggtatccgattgttgttgcttctactcttattggtgcagtagcgactatcacaactctattgctcaaattcatttaattaattggccccgtaaggggctttgttctggaatacttatgcgactgatcggcaattattctcctcctactacagaagatctcattaaactcaaagaagaattaggtttcacgggagaacaaatggccgatttagcgggagtttccggtaacaatcaatggagaaaatacacgggtgggaaaataccacgtgttatttctctgcacattctattctataccctatggatttcaagatgcatcgcgacggcaagggagcgaatccccgggagcataggtaactatgtgaccggggtgagtgagcgcagccaacaaagaggcaacttgaaagataacaggtatatatagcaacacagttaacactatcataagatgatttaaaccgcattttggctaagatgcgggaaattggtgctaatgtaagataaataggcacgctccacttaacgatttcctctgattgataatctattttattgagatgtagatcatcaatagatcggttatagcgaattattctggtcataaaatcgatttttttcgaaaccatagctagagtaccatttaagtccgatcagtttcagaggttaatcatcgtgacagcaattattcgtcaattcctgaaattagaagcggctggagggcttcttcttatcatcactgccattattgcgttgataatggcaaactcgccattacagggtatttatcagcaatttcttaatatttcggtggcagtacaattcgctgcactggagatcaataagcctttgttgttgtggattaatgacggcttgatggcggtcttctttttgattgttggtttggaagtaaaacgggaactgttggaaggctctttggcagggcgtgataaggcactatttccggtgatagcggcgataggtggtatggtcgctccggcactaatatatctactctttaatggcaatgatgagtttacccgtcagggttgggctattcctgcggcaaccgatattgcttttgccttgggtgtgatggcgctattgtctaagcgagtaccaacagaactcaaggttttcttgttggcacttgcgattattgatgatctgggcgttatcgtgattatcgctctgttttataccaaaacggtttctcttgtggcgcttggattgtcagcggcaatgattgctttgctggtttggatgaattggcgcggtgtcgaaaaaacatcggcttatttggctgttggcgctatcctttgggtttgcatcttgaaatcgggtgttcatgcaacactcgccggcgtcattgttggttttctgattcctctgcgtggccagaatggtcattcaccatctgaattacttgagcacggtttgcatccttgggtggcgtatcttattttgccattatttgcatttgccaatgcaggtgtagccctgaatggcgttacgttaaatggtttgaccgatatattgccgttaggtattgctgtggctctgtttcttggtaaaccattgggcatttttctttttagctatatttctattcagatcggatttgctaaattgccacagcagattaatcttaaacagatatttgcggtttctgttctttgtggaattggctttactatgtctatctttatttcaggattggcttttgaaggggtggatgaatctttcagtgtctattcccgtcttggcattctgatgggttcaaccatcgctgcgtttatggggtatggcttgttacgaatggtcttaccaaagaaaaagtgatggcagagtggtgataaattcattaatttagccaaatgaagttctacattttagagaaaatttctggactgactcatcatttttgtatttgcggtacaacaactagaattgtatcgcggatgctttatgtagtggaaaaacagaaaatcaccgggagacggtggattagtaatgtatggctggcgttgtctaccagacgaaggcgatacataaggaaaaaagtatgcgggtgtcacatctgaattttaatcatctctattatttctggcatgtttgcaaggaaggatctgtggttggggcggcagaagcgctttatctaacacctcaaacgatcacaggacagataaaagcgctggaggagcgtctgggagggaaactgttcaaacgtcagggcaggggattagtgccatcagagctagggcagcttattttccgctatgcggataagatgtttatgctgagccaggagatgttggatattgttaactacagccgtgaatctaatcttttatttgatgttggtgttgctgatgcactgtccaaacgtctggttagccaggtattgaaaacggcggttgtggaacatgaacagattcatctacgttgttttgaatcaacccatgaattgttgctggaacaactcagccagcacaaactcgatatgatattgtctgattgcccggtggattcttcccaacaggaagggctgttctcggtaaaactgggtgaatgtgatgtgagtttcttctgccgacaacctatcccggaaaaacctttcccggagtgtttggaggaacgtcgcttattggttccagggcgtcgctctatgttggggcgtaagttgttgacttggatacgtaataaaaatcttcaggttgaagtactaggtgagtttgatgatgctgcgttaatgaaagcgtttggtatgtatcataatgcgattttcgtggcgccatctttgtataccaatgatatttttatagataatgatattgccgagattggtcggttagatgctgtgcaggaagagtattatgtgatttttgctgaacgaatgattcaacacccggctgttcaaagggtatgtaataaagatttttctgcgttgtttaatgtgctatctaagaagcgtacttaaaaataattgatagtcactgttaacacaaaaaaaccggcgcaggccggtttttcagtaacccaaccgcaaattattgcattgcgttgatttgcgccgtcagattagatttatgacgtgctgctttgtttttgtggatcagacccttacaggcgtgacgatcaacaataggttgcatgtcatgaaatgctttctgcgcagcttctttatcgccggtagcgatagcagcatataccttcttgataaaggtacgcaccatagaacgacgactagcgttatgcttacgacgtttttcagactgtatggcgcgtttcttagctgatttgatattagccaaggtccaactcccaaatatattctatcaaggacaattcaaaggccgaggaatatgcctgttcaaccttcttttgtcaatggatttgtgcaaataagcgccgttgtaccgcggcaacttgtttcgttgtgatggcgcaggattttatcagcttacttagtgggaatacagtctttcacaataaaaatctcattgaatagtccagatagaaataaaatgaatatttttcgggattcctgctcgtttttgttgtatgaatcagggctattgatttaaatcatcttatgatggtgggttaaccttgagctttgtacaaggtataatttggcaatttccagggtattgagccagctatggagctaattcgcggtatacgtaatatccggacatgtcaccgcggttgcgtgttgacgattggtaattttgatggtgtccacagaggtcatcaggcactactgaaacacttaaaacacgaagggcagcgtctgggattaccagtaatggtcatgatttttgagccacaacctttggagttttttgctaagggtcatgcgcctgcgcgtctgacgagattgagggataaagccaaatatctcgcccaatgtggagtggattatttattatgtgtgaaatttgatagaaattttgcggcaaatacgccagaagcctttgtttcacggttgctggtggaaaaattgggtgttaagtttctcgctgtaggagacgactttcgttttggtcaatctcgcagtggtgattttgcctttttgcagcgagccggtgagtcatacggctttgatgtgaccagcagtgaaagtttttgtgatgatggtttacggattagcagtacagctatccgtcaagcactgcaaaatgatgatttggtattagccgaaacattattgggacatccatacagcatttgtggtcgggtcgttcatggtaagcgactagggagcactattggttttccaacagcaaatttgccgttaaaacgattagtggttccggtacacggcgtttatgttgttgaagtttatggtttaggagaccagcctttaccgggtgttgccaatattggtacacgtccaacagtctctggtcagggtcaacaacttgaagtacatctaattgatacccaaatggatctctatgggcgttatattgatgtggtgttacgtaaaaaattgcgtaatgaacagcggtttgcttcccttgatgcactcaagcagcaaattgcgaatgatttggttgctgcgaaggaattttttaagcagctacctgtgtcatgtatctagcggaaaattggaattgagaatcgaatgagtgactataaaaacaccctgaatctgccagaaacagggtttccaatgcgcggagatttagcaaagcgcgaaccaaatatgttaaaacgttggtacaaagatgagttgtatcaggtaattcgtaaagcaaaagccggtaaaaaaacatttattctgcatgacggccctccttacgcgaatggcagtattcatattggtcactcagtcaataagattctcaaagatattattattaaatccaaaggaatggcgggatatgattcgccgtatattcctggttgggattgccacggtttgcctattgagcttaaggttgagcagattattggtaaaccgggggaaaaattttccgccgctgaatttcgtgccgagtgccgcaaatatgccaaagagcaaattgaaggtcagaagaaagactttatccgtttgggcatattaggtgactgggaacggccatatttgacgatggactttaagacagaagccgacattattcgtgcattgagccgtattatcgctaatggtcatttgttgaaaggtgccaagcctgttcattggtgtactgattgtcgttcatcactggccgaagcagaagttgagtattacgacaaaacttcgccatcaattgacgtgcgttttaatgcggttgatgcagttgccgtttgtgagaaatttggtgtgcaggcaccagaacaaccggtctctctggttatctggacaaccacgccgtggacgttgccggctaaccgggcgatcgctttgcatgctgaatttaactatcaattagtacagattgagggtgaatgcctgatcctggctgctgatttggtagaaagtgtgatgcagcgtgcaggtataacttcgtggacagtgctagggcattgtgcgggttccgcgttggagctattgcgctttaaacatccatttatgggttttgattcaccggtagtactgggtgatcacgtgactttggatgcgggtaccggtgctgtgcatacggccccaggtcacggcccggacgactttgttctcggtcagaaatatggtttggaagttgcaaatccggttggccctaatggttgttatctacccggaacttatccttctctggatggcatgtttgtctttaaggcgaatgatgttgtgctgaatatcctgagtgaaaacaatgcattgttgcatttggaaaaattacagcatagttatccctgctgctggcgtcacaagacgcctatcattttccgcgccacgccgcagtggtttgtcagcatggatcaaaatggtctgcgtaaacaatcgttgcaagagatcaaaggggttcagtggataccgggttggggtcaggcccgtattgaggcaatggttgaaaaccgtcctgactggtgtatttcacgtcaacgcacttggggcacgccgatgtctctttttgtccataaagagacggaagagcttcatccacgtactatcgaattgatggaagaagttgcaaaacgtgttgaagttgacggtattcaggcgtggtgggatctggagccagccgaactgttaggtgatgatgcggctaactatgtcaaaatttttgatacgttggatgtttggttcgattcgggatcaactcacgcatcggtggttgatgcccgccctgaattccagggtaatgctgcggatatctatcttgaaggttcagatcagcaccgtggctggtttatgtcttccctgatgatctcaacggcaataaaaggtaaagcaccttatcgtcaggtgttaacgcatggtttcactgtcgatggtcagggccgtaagatgtctaaatctatcggtaataccatcagtccgcaggatgtcatggataaattaggggcagatattctgcgtctatgggttgcttctaccgattataccggcgaaattgcggtatccgatgagatcttgaaacgctctgctgatgcatatcgtcgtatccgtaacacggcgcgtttcttgttggcaaacctgaatggtttcgatcctgaacaacatagcgttaaaccagaagagatggcggtgctggatcgttgggctgtggggtgtgctcaagcggcacaggcggacattgccaaatgttacgataaatatgatttccacactgttgttcaacgtatgatgcaattctgttccgtggagatgggatcgttctatctcgatatcattaaagaccgtcaatacactgctaagagcgatagtttggctcgtcgcagttgtcagactgcgctgtatcatattgcggaagcattggttcgctggatggcacctatcctctcctttactgctgatgaagtttggaatgagttgcctggcaaacgtgctcaatatgtatttaccgaagagtggtacggcggtttgtttggtctggcggcaggcgaactaatgaacgatgctttctgggctgatttgttggctgtgcgtggtgaggttaacaaagtgctggagcaggcacgcgcagacaaacatatccgtagttcactggaagccgcggtgacgctgtacgccgataatgaattggcggacaaactgaatagcctcggagatgaattgcgttttgttctgctaacatctcaggttgttgttgcagattatgagcaggctggtgaagatgcgcaacaaagcgaaatcggtagtctgaaaattgctttccgcaaggcggatggcgaaaaatgtcctcgttgctggcattacgctaaagatgtgggattggtggcggaacatgcagaactttgtggccgctgtgtaactaatgttgccggtaacggcgaagagcgtaagtttgcctgatgaataaacccatttgctccaccggccttcgctggctttggttagttgttgtggtattgattttggatctggggagtaagcagttagtgttgcaacactttcatctgtatgaatccgttccattgataccttattttaatctgacttatgcccagaattttggggcggctttcagtttccttgcagagaaagatggttggcagcgttggttctttgcattcattgccgttgctatttcagttgtcctgatggtgatgatgtatcgtgccagcgcaaagaagaaactgagtaatatcgcttatgccctgattattggtggagcactgggtaatctgtttgaccggttggttcatggctttgtcatcgattttattgatttttatgtcggtgattggcactttccaacttttaatatcgccgatatggcgatatgtatcggggcgggattggttatcattgatagctttctaagcccggatgaaaagaccatcaaagtgggataagtaatatgtcaaaccaggtgcaggcggatagtgcagttttactgcacttcattttaaaactgcaagatggctctattgccgactccacttacactcagggcaaacctgcattatttcgtttaggtgatggaaccctttcttcacctttggaacagcagctcactgggctaaaagacggagataaacatacctttactctggcgggtgagaatgtatttggtaaaccaaatcctgatctgatccaatattttactccgcgtgattttgccgcaacgggtattcctgaaattggcactataatgttatttacggcaatgaatggcagtgaaatgccgggcatagtcaaagcggtaacagaggaatctgtgactgttgatttcaatcacccgttagctgatcagaacgtcacgtttgaaattgaagtggtggaaattgatccacaattggaggaaaaccatgcagatattgctggctaacccccgcggtttttgtgctggtgttgaccgtgctatcagtattgtagaacgcgcactggaattatatggtgcgccgatctacgttcgtcatgaagtggtgcataaccgttatgttgtagataacctgcgcaagcggggggctatctttattgaagaaatttcagaagtaccggatgatgcgattctgattttttcggcgcacggtgtttcacaggctattcgtgctgaagcgcgttctcgcaatttgacaatgttgttcgatgcgacttgccctctagtgactaaagtccatatggaggtagcaagagctagccgcaagggcaaagaagctattctgattggtcacgctggacatcccgaagttgaaggtacaatgggtcagtacaacaatgcggaaggtggaatgtatctggttgaatctccggcagatgtatggaacttgaaagtcaaagatgaagacaatttgtgttttatgactcaaaccacattatctgttgatgatacttcagaagtgattgatgcacttaatgcacgattcccaaacatcgttggtccccgtaaagatgatatctgctatgcgacgactaaccgccaggaagcggtacgggatctggcgtctgacgccgatgttgtcttggttgtaggttcgaagaattcatctaactctaatcgccttgctgagttagctcagcgggttggtaaacctgcttacctgatagattctgctgaggatattaaagaagagtggattactggcatctctttggttggcgtaaccgcgggcgcttcggcaccggatattttagttcagcaagttattgaacgcctgaaatctcttggtgctgattccgtccaagaattacatggtagagaagaaaatattgtatttgaagtgccaaaagagttacgtgttgaagttaaagaaattagctaacccgaattccgtttaagccgtcactgggaaatcttcttctgagtagaaaactttcagtgatggcttcttccatttgaggcagtatgcaatcaccccatctaacacggtcaacagaaatccttttatacttcggtgacgcgaatgctctatctgaggaagggtttttaattgcccattaatcggttgagcagaccgtaggaactgctcccacagtctctcgcagaacggtacgtgagtctctcgactcataccgctcccatcaagtaaatcgtccaaagcaagccagataaaaggagctccaactatgtcatcacctaccgtaaaaatcctgcgtatgcctgacagttgtcaacaaactaggtatcgctcgctcgaccatttacgattggatcaacccgaagtcactgcgttatgacaatacattccctaagcagcgccagctaggaaagtaatccgtcggttggctcgaatcagaactggattagtggcttctccaacgtgaaacactagccccttgagtcattcatctacaacgtgccggaggttttatctccggcaaaaaacatttatcactgacctttcttataattatccgagttgataccagagcaaatcaagattgcttgtaagctttgagcaaagattccggaataaacgtcagattgcctcttgcccttgagcaggccacatatagtttattgcgtgtctccgcattgatatcccgaaaacttccctttttccaagctcttacattagcgggattaaggactacacatacatcatgatagtggtctactcccttcgatgctccccaattttgggagtggcaggaatacttgtggtgttccctgtaaaacagcttcaccgtttccggatcccggtagagagcaagtacagcttccgggttatcctcgtatctaatgacactttcccggcgatcataagcttcgatttcgataccaatcttttccgtaataaaatcgcaaacacttttgctacatctgcggctctttttgagactgtcggtatcgacgagcaatttagcctttttaaatttagcctcgtagaccgtgtaatctttgtgaagactagcgttcacattaccatctcggcttgtgtcgaatgtgtgttggaaaaaatcgccaacaaaggagacatttaactcagcggcacttatggctagcagaaggttaaaatcatgcccagcaaagtcctgaacctcatccacgaagaaagcatcaaaatacttctccatacgcgctatgatcgcaccaaccagatgagattgctcgatgaatttggcaagacggttggcgtaaacctgacgattggttgacacgtaacgccggtcgtcagtcaatgcataccgtgggtatgccaagggaagtttgaatgtgatacctatggtattcttatccgatcgtagaaatggccggtagcaaaaaccgtgtaaaaatttgaaatacgtgtagagagtaatatttgctggaaagtaaccgaatcgatttataatttttccacgcaaattgctgtagttagactctgtataagtaacgataagaaagcgcttctcctcatcaaggctggcaacaagacgggatgtcttacccgatccggcaacggcaaatactactctcttatccatgtgattgcctgctgaatgtaatttggcgcgacaagttcggttcccttttgttcgagcaattcgaatgcagcttccgtcttgttttttaacatatattcttctacggtaagcttttttcgacctgctgcgaactgaccttcacaaatggtcgtattatcttggtatatgcaaacctcgaaagtgtaccgagcatcgtcagcgtctgcgaaaatctgcacagaatctgaaatgaggtcagcatagttagtaacacaattgcttttgtagtccccgtcattgtcacggatagccgcaaccttgatgccaagcaacttggctagctcaagataacgcttgaaacttgttccatcgacagagattacatagataccatcggtatcagtacttgcacctccagtgcagtttttatagagggcatccatgaggataaactcagcatctccctccacaaggatagccttcttacacaacgcaagttccagcacattgttgtcgggagccttcatgaagaaattggctgtgctctgactgagatctttgagagaagttggttgggacaagttttcttcgctcaatattagtactttcttgaggttcaaccgagttgcaatcaaactactatgagtagcgatgaaaagctgctttttgaccgaaccccggatgcgatcaataagcttatgcatatggacatggctaagatgattctccggctcttcgagaaggaggatatcaagtacgtgttcgcgattgcgcaaggcaaattccgtcttgataaagcattggcgacctttccccttactatcgatcgggatatcgccttcagtaataataatatccgtttcgacactcgcttttgggcttgtccgaacatcgaatttgtagatgtccaatgcatcattcatcgttttgaaaactactctcttaaactcagacttagctttacggtactcaaaactgtgatgattacgctctacaacagacgcatgagtggtatacatggtgcgggtatactcacgagtggcatactcgctattgatctgagaactatctatgagtaagtgctggagcggctttttatatggaaggatagtctcgtccgtgaaggttagaaaacggatgctatagtactcaaaaggaaagttatcgtgcctctcagctaaaatcgtctgaatttcttgtgtgtatttatcaacaggcttgcataccaacttgatgcctaagtgatctatgctcttgctgttattacggccatctagttcgtggtgaccttcaatcccatctaggtatacctctatcagcagctcaggtagttcgacgatttttctctcacctttcaggaattccgagatacattccatattgaaaagggtttcaagaccgagcgattctaccttacttcgactggcgttgagcgcgatatcaattgcctggagcaccgaacttttgccagcttcattgccgccaaccagaatatttaattcaggatcgaattctaattcaagatttttaaatcgtttgaagtttttcagaaccaatctgcgtattattgccaccagatttccttcctatgcgaaattttgatttaccctaaataagagatatccccatcaatctcttgaaagaagtttcacaatccactttggctcatcgatcataagggatttatcgatctcaatatttgagatacgttcgttatatgtacgtatcaaatgagcaactcccttgcgtattctatcactttcatagatagcaatttcttcaatattagtaccaatgaaaatttctgctgcttgaacggagatttggtcagacatgccaacgttttcagccatttgacgagcagccaataccttactttccagcgtcagtattacaggtcggtaaccagctctcttgttttcaacgcagcgagaaacaagcttttccataggggctgtagtgacatgaaatgctgtcgttccaacttgaaaatcaccttcccgatcggtttgcatatctgctgcattagctcggtcgaggccgatcttaatttctggaaaacgcaattgtaatttcgcaccaattagatgttggagaacaaccccggtaggcttatcagaacgttcagccgctgcatccagaatatcagaaatgatcgatgatactggtttggtggtttcaatatcgaccgtaattctttgtttatcgaaataatcaatgcgaacacagtttgtgaagaaatcttcaagcaacaaagagagatgattagtgttcaacgtagctccagaagagcgattgatgccattcatagcgtcgcgaaatgaaaccgctaagtggatcgttcctctcgatgttctcccaccctctcgtgtaaataggcgggtctcgccatgctgttcaagaatcttggcgatagtgttgccactcaaaccacgaacctggctcctaccctcgctgtaaagtcggccatcatcgatgggaaaaccatcagcgatcatgcgtgaaaccacaagccccacgttcatgacattggtatttatggagccattttgtgcccgctggctttcataccacgctttagctgcattcaaatactgctcaataagagtatctttctcacccatttattatttttccatcgaacatctgaatactaaccaggtgtggaatgagcatgtgcttggcgatccatccgacaacaggtacagcaacggcatcaccaaacccataatgaacttgtgaatcgcgcatattatcaagagaataccaaccggcccccatcagacgtgcatattctagtccagtcatccacctgattttcacactgccgccgcccataattactaccgcttgctttgatgaaccaccacgcgcggtacgtaaacaaccagagacatcttcggctcgcatttcccatacaggaattccgttccgggtacgacgataagctgttcgggcagtcatgtttggtaattcgataaatgcttccaaccgttctcgttggactggagccattgagtctacaaatcgtttaacccgatcgcctccccaccatctggggtcattatgcggcatttgttctatttcacgggttaaaccttcgctgagtaaatctggcgcttttggtagcggcatcatgaaagtacgaatttcagcgtcttcatgaagccaggcaagccaatcagggcgtaagcaagtatcttgctccccgccgtcaataggatactgagcgccaattaggaataaacgtgggcgtgattgcgggataaagcggcgagcatctagagtaatggcatctacagcataacctagtgaattgaactccttggctgccgcacgcaaatcttcacgattatgagatgaagcaaggccagtcacattctccagggctataactttaggttttcgctctttcatctctgctatcagacgagtaaacccaaaaaaagcagatgattcacgtccaccacgtaaaccagccctttttcctgcaaggctgagatctgtacacggtgaagaggaccatgcaacatctacagttggtagatcatcgccacaaagcgaatgcacatcagccagcaaaagctcgttgcctccccactggccttcgtacatagcctttttattaatgtcgtagtcattagcccaaagagtttttataccagcgagttccaaacctgcccttgccaggccgataccagcaaaaaactctaaagctgtccaatcgtgttgacggcgaagcggcactacattcacttggttcctccttcaattcgtcccgtatcatcccataaacaggttcattagtcacatacaggacaaaggttgcttcagcttttgattaaacgcttcctcccgcgcttctgcttcccttacttcattcattcaacagttcagtagagctgtcagtttattgataaagtgctggtttttttatccggcccgttgttttaattaacctgaatactggttaagccgtcactaacatattcatttctgagcgggaaatattcagtgacggtttgttctctttgagacaataagcgatgagtccacccaacacattcaacattaatacctgtacactatgatgccgtgaatgctctatctgagaaatattctttaactgatcatttgatggtttatatgatgaaacgctttgataacatcaccgtatcccacactgagagcgcttttgccttcatgtgcgctgacgatttccttccccaataccctgttgtttctaggatggaatgaacacacggcaaaaatcatcgacaccgcagaagagttcaactaatttattcatgcttgttcctcatgcgttcttttttttcttggtcgaaaattttgatcttggaacaggcatttagttccattttttatctagagttcaggttagttaaataatctgaaatgttgtgccagataaaagtaaagtagtatatccgctctttatttaaggcattcatctgactgatcatcgtgttaaatcaggaaagggactaacttcatagtgagggcttatggctgatacagatattcgtgttgctattgttggcgctggtgggcgtatgggacgtcagttgattcaggccatatatcaattagatggtgttgctcttggtgcagctttggagcgctccggttcttctctgattggcgcagatgccggagagttggcgggtattggtcataacggtgtgactgtttgtgatgacctgacaagtatcgttgatgattttgatatccttattgattttacccgtccagaaggaacgttgactcatcttgaaatttgtcgccagaacggtaaagcgatagtgatcggtacaactggctttgatgaggcgggtaaacaggcaattaaacaggcttctgctgatatcccgattgtatttgccgcgaatttcagtgttggtgtgaatctggtgcttaaattattggaaaaagcagcgaaagtgatgggcgagtatagtgatattgaaattatcgaagcgcatcaccgccataaagtagatgcaccatcaggaacagctttagcaatgggggaatctattgctcatgctttggggcgggatcttaaagcgtgtgctgtctatgcccgtgaaggttataccggtgaacgtgatccgaaaagtattggttttgcgactatccgtgccggggatatcgtgggtgagcataccgctatgtttgccgatattggggagagagtagagataactcataaggcttccagtcggatgacgtttgcaaatggcgcggtaaaggctgctctatggttaagtggtaaaaatagtggtctttttgatatgaaagatgtgctaaatctcgaattaactttaaaaatttattttttttaacttattgatatcgcataattaaatgttttattatgcgatttttaatttatttgtttaattctattgttttttggtttattttttctatttttgtcttgtttataaccttaattttctgctttcttctcctttttgtgattattttcaacttttcatctgaaaatcaaatcttctatgctcattaccgttttatcaattaactttattgctattttcagtcttatttcattggtttgtctggcgaagtgtgcaaaaaaataagaaaagtaacattttttgtagacaactctccctctcatcattagaatgcgcgcaatttgccaaaattttgcctaaaaagcagcttttgcattgattttgaggaacaaatctgaattaatatgcactaattgcgagtaattattctttggagggtgttttgattaagtcagctatattggttctggaagatggaacccaattccacggtcgtgccataggtgcggaaggggcggcagttggggaagtggttttcaatacctcgatgaccggatatcaagaaattctcacagacccttcctattcccgccaaattgtcactcttacttatccccatatcggtaatgtcggtgttaactcagtcgataaagaatcactaaaagtacaggcccaagggctagtgattcgtgatctaccactgttgaccagtaatttccgctgcgaagaaacgctttctgattaccttaaacgtcataatattgttgcgatagcagatatcgatacccgtaagctgacgcgtttgttaagagaaaagggttcacagaatggttgtattatagcaggtaaacagattgacgctcaggttgcactggaaaaagcgcaagcgtttccggggctggaggggatggatttagcaaaagaggtgacaactaaacagatttatccgtggttacaggggagctggaagctggcggggggattaccggaagataagcaagagcaggatttgccttatcatgttgttgcttatgactttggtgcaaaacgtaatatcttgcgaatgctggtggatcgtggctgccgcctgacagttgttcctgctcagacatcggcggaagatgtactgaaactgaatccggatggtattttcttgtccaatggtccgggagatccggcaccttgtggttatgcaatcgatgcagtcaaaaccctgcttgagacagagattccgatctttggtatctgccttggacaccaattgttggcattagccagtggcgctgaaactatgaaaatgaaattcggccatcatggtggtaaccatccggtgaaagatcttgaatgtaatgttgtcatgattactgcacaaaaccacggctttgctgtggatgaaaaatcactgccgtcaaatttgcgcgttactcataaatctctgtttgacggcacgttgcaagggattcatcgtaccgataaacctgcattcagtttccaggggcacccagaagctagccccggtccacatgagactgcatcgttatttgatcactttattgaactcattgagcagtattgtcagaaaaataatcgtcataacaccaagtaatcaggagaaaataaaatggcaaaacgtactgatattaaaagtatcctgatcctgggagcgggtccaattgttattggtcaggcttgtgaattcgactactcaggagcacaagcttgtaaagcgttacgggaagaaggttatcgtgtcgttctggtgaactcgaaccctgctaccattatgactgatccagaaatggccgatgccacttatattgagccgatccattgggaagtggtacgtaaaatcattgaaaaagagcgtcccgatgcgattctgccaaccatgggcggacaaactgcactcaactgtgcgctagaactggagcgtcagggagtactggaagagtttggtgttaccatgattggtgctaccgcagatgcgattgataaagcggaagatcgttgtcgtttcgatatagcaatgaaaaagatcggtttggaaactccgcgttctggtatcgcccattcaatggaagaagcgttggcagttgctgatcaagtcggttttccttgtattatccgcccttcctttactatgggaggaagcggtggtggcatcgcctataaccgtgaagaattcgaggaaatttgtgagcgtggcctggatctttcaccaaccaacgaacttttgattgatgaatcgctgattggttggaaagagtatgaaatggaagttgtgcgggataaaaacgataactgcattattgtctgctctattgaaaactttgatgcgatggggattcacaccggtgattccatcacggtcgctccggcgcaaacgctgacggataaagagtatcaaatcatgcgtaacgcttcgatggcggtattgcgtgaaatcggtgtagaaactgggggatctaacgtacagtttgcggtgaacccaaaaaatggccgtttagttatcatcgaaatgaatccacgcgtttctcgctcttctgcgctggcttcgaaagcgacaggtttcccgatcgctaagattgccgctaaattggctgtgggctatacccttgatgaattgatgaatgatatcacgggtggtcgcacgccagcgtcctttgaaccttctatcgattacgtagtgactaaaattcctcgttttaatttcgagaaatttgctggagccaatgatcgtctgacaacccagatgaaatctgttggtgaggtgatggcgattggccgcactcagcaagaatctctgcaaaaagcattgcgtggtttggaagtgggggcaaccggttttgacccgaaagtcagtttagatgatccagaagcattgactaaaattcgtcgcgaattaaaagatgcaggtgctgagcgtatctggtatatcgcggatgctttccgtgcgggtatgtctgttgatggtgtttttaacctgactgatattgatcgctggttcttagtgcaaattgaagaactcgtgcgattggaagagcaagtagcagagcagggcattaacagcttgacggctgacttcctgcgctatttgaagcgtaaaggttttgctgatgcacgtctggcgaaactggtcggtgtggccgaaaaagagatccgcaaactacgccacaaatataatctgtatccggtttacaagcgcgttgatacctgtgcggcagaatttgcgactgatactgcatacatgtattccacttatgaagatgagtgtgaggctaatccgaatagtgacaagccaaaaatcatggtattgggtggtggccctaatcgtattggtcaggggattgaattcgactattgttgtgttcatgcggccttggcactgcgtgaagatgggtatgaaaccatcatggtgaactgtaacccggaaaccgtttcaacagattacgatacttcggaccgtctctatttcgaaccggtgactttggaagatgttcttgagattgtgcgtgttgagcagccaaaaggggtgattgttcaatatggtgggcagactccgctgaaattagctcgtgaactggaaatcgccggtgttcccattattggtaccagcccggatgcgattgatcgtgcggaagaccgtgaacgttttaaacaggcggtaaatcgccttggtctgaaacaacccgaaaatgccaccgtgaccacgatagaacgggcagttgagaaggcaaatattctgggttatccgctagtggttcgtccatcttatgttttgggtggccgtgcgatggaaatcgtatacgacgaagttgacctacgtcgttacttccagacggcagtcaatgtctctaatgatgccccagtattgcttgattgtttccttgatgatgccgtggaagtggacgttgacgctatctgtgacggtgagcgtgtattgatcggcggcattatggaacatattgaacaggccggtgtgcattccggcgactcagcttgttcactgcctgcttacaccctaagccaggaaatccaagatgtcatgcgccagcaggtagaaaagctggcatttgaattgggtgtacggggcttgatgaatgtccagtttgccgtcaaggatgacgaagtttatctgattgaagtcaacccgcgtgcggctcgtactgtgccatttgtttctaaagcgaccggtttaccactggcaaaagttgcggctcgtgtgatggttggtcaatctctggttgagcaagatgcaactcaggagatcattccaccatactattcggtgaaagaagttgtattacctttcaacaaatttccaggtgtagatccgattcttgggcctgaaatgcggtcaaccggagaagtgatgggggttgggcgtacattcgccgaagctttctcaaaggcactattgggatgtaacgccagaatgccgcaaaatggtagagcacttttgtccgtgcgtgaaggtgataaaggccgggttgtggatttggccgctaaattgctgaaacagggctttgaactggatgcgactcacggtactgcggttgtgctaggtgaagcggggattaaccctcgtctggtgaataaagttcacgaagggcgtccgcatattcaggatagaaccaaaaatggtgaatatagctatattgtaaacacgactgcgggtcgtcaggcgattgaggattccaaacttattcgccgtagtgcactgcaatataaagtgcattatgacaccacattaaatggtggatttgctaccacaatggcactgagtgccgatccaactgagcaggtgatttctgtacaggaaatgcatgcgatgattaatagttagtctctattctgattaattgaagtaataaaaagtgcgctctgtttagcgcacttttttatgtttactgaaaaattaaagagaaagaatcactgtctgttatcccagtgctactttgacacctaatccaatcaaaacaatgcctagtaatttatcgataatcttctgagccttagctaatccgcggcgtaccggtgcactttgaatcaatatgactaatattggccaatagatgactgacaatccccagataatagaggcataccataatttttcaccaacaccagaattgacatttagcaactgagtaaatattgccaggaagaacaacgttgctttggggttgagcaaattacataagaacccctgcataaacgcttttttgaaagtgataatctgtcgtggctgattgtctgggagaatgctgttgcctccgcgagaaagcaagctattgatcccgatccaaataagataagccgctccggcatatttcatcagattaaatagccacggcgttgtggtgataacaatagctaacccggcgacacagtaagccatatgacaagtgatagcggcgattaagcccgcaactgtcatcatggcagcagaacgctgataacgtatggcatttttgactaccagaaagaaatcggggccgggagagagcatacccaacgttgagataatgatgacgactagtgatgtttccagcataatgtaccctatggttaatattagctttgttattattttgatcaataaatgtcttaagtaataaaccaagtataaattaatcttttgtacttaagaaagcgttgagcctatcgactgggtacatccctttccgtatagtgtcatcaatttttatactatttgcctaataaggtggcttaatgaatatcagcttgatcgctgctttagctatggatcgggttatcggcatggagaataaaatgccgtggaatctaccgggggatctagcctggtttaaacgtaatacattgaataaacccgttattatggggagagtgacttatgaatctataggtcacccgttgccgggaagactcaatattgtattgagtaatcagccgggtaatgacgagcgtgtaacttgggtcagttcagttgatgaagcactggctgtagcaggtgatgcagaagaggttatggtcatgggtggtggtaaagtttatgaccaatttatttcacgagcgagtcgtatgtacctgactcacatcgatgcagaagtgataggtgatacgcattttcctgactatgaaccggatgaatgggattctgaatttactgagtaccatgatgccgatgaattaaattctcacagctactgttttgagattttacaacgtcgtctctaactgatagaacacgccgatgagcttttttcacggcgtgtctggcttaatgctgttttactgccggtaacgatgattgtgtaaaatattgcttatcttcccaacgcaacatcgtcagttgtcctccccaacaacagcctgtatccaatgcataaaagctatcgggtgttccctggccttccaatgatgcccagtgaccaaaaacgatggcatactctggtgggatttgccgttctagttcaaaccaaggttttaacggtgcaggcgcattttcgggtttatctttgcacaacatgtctaactgaccatttggaaaacagtaacgcatacgtgtcaatgcattagtactgaaacgtaaacgtgccagcccagagagttctggtgaccagttgtttggcatatccccatacatggaattgagaaacagagggtaacagctactgttgaacatagtttcaacttcgctggcgcacattttggctgtttccaaatcccattgaggcgtaataccggcatgtgtcatgagcagttttaaatcatcatcgaactgtagtaacggttgtttgcgtagccaattaattagttcatcggcatctggtgcagacagtaacgtatcaattttatctttaggtttattacggctgatcccggcataaacgcccaataaatggagatcgtgattgcctaataccattcttgcggctgaacctaactgtttaacatatcggagaactttaagagagtctgggcctcgggcaactaaatcccccgttaaccataatgtatcctttgtaggatcaaaattagccttagttaataaagcacgcaattcacggtagcagccatgaatatcaccaatgagatatgtagacataatcaattaatcagcgttgggatagccagacggaaaaccggaatagcaacgcgaaatggttcaccattgtgatcaatcatttcataatggccttccatagtacccaagggcgtttccaatatcgccccgctggtgtaacggtattcggtacctggctggattatgggttgctcaccaacaacaccttccccttgaacttccgtttgatggctgtcgctgttggtaatcagccagtaacgattaattaattggacccgttcgcgcccaagatttcgaatagtaattgtataggcaaaaacgaaacgccgttgatcgggacacgattggctttctacataaacactttgtacctgaatagaaaccctgggcgtattaatcataattgactcctgttatgactgcatttcaggttgttctgatagccagtttgccattttacagtactgttcaacagaaatattctctgcacgagtacttggatcgataccaagttctgtgagctgttctacagtaaaaagatcaccgaggctgttacggatagttttacgccgttggttgaaagcttgagtcgtgatccggctcagcatacgaatattcttgacgggatgcggtatgcttttgtgcggtaccagacgtacaacggctgaatcgactttaggtgcaggagtaaacgcggttggcggtacttccagcacagggataacctgacaataatattgggccatgacacttaaacgcccgaaagttttacttccggggccagctaccagacggttcaccacctctttttgtaacataaaatgcatatcagcaatagcatcagtatagctgaaaaggtggaacattaacggcgtggaaatattataaggtaaattaccaaagacgcgtagcggcttccctctttgctgagacaattcgccaaaattaaccgtcatggcgtcttgctggatgatggtaagtttatcttttaattgtggatgaacttgtagacgtgcggctaaatcgcggtcgagttcaaccacggtcattttatccatacgttcgccgaccggttctgtcaatgcaccaagaccggggccaatttccaacactgcttggccgggttgtggattgatagcggcagcaatactatcaatgacaaattgatcggttaagaagttctgaccgaaacgtttacgggcaaagtgcccttggtggactctattattcattactgttttgtatcattttaattgctaaattcaatgcggtgataaagcttcccacatcagcttgacctgtccctgctagttccaatgctgtgccatgatcgaccgaagtacggatgaacggcaggcccaatgtaatattcactgctctgccaaaaccttggtattttaacacgggtaatccctggtcgtgatacattgagagcacggcgtccgcatgttgaagatatttaggttgaaacagggtatctgctggtaaagggccttccagcacgataccttctgctctcagactggctaacgcaggaataatgacatcgatctcttcccgtcccatatggccgccttctcctgcatggggattcagaccgcaaacataaatacggggttttgccaggccaaactttgtttttaaatcatggttaagaatagtaatcacttcccgcagactatcgaaagtgatggactttggtacatcaacaatgggtagatgcgtcgttgctagggcaacccgaagttcttctgtcgcaagcatcatgacgactcgctggcatccactgcgatcggcaaagaattcggtatggccgataaaaggcacgccggcatcattgatattccctttatgaactggccctgtgactaatgctgaaaattccccgtttaaacaaccgtcacaagcttgtgccagtgtttcggtgacatatctaccgttttcttgattcaattcgccagcgattgcgggcacatgaagaggaactggcagtattgtcaatgtcccggcagcctgtggctcgggggttttgtcagcagaatattcttgtagttgcaaaggtaaattaagttgtctggctctgtcgagaagcaggttggggtctgcgcaagcgaccaattgcattggccaactttgttgagcaagagccactgttaaatcaggcccaaccccggcaggctcgccgggggtaataacaattggtttattgataataatcggtttattgttgtgcatcgttgccatctaaaattttcacataagctgaggcgcgttgttcctgcatccagctttgtgcttcttcggtgaatttacggttgaacaacatacggtaagcacgatctttctgagcgacatctgttttatcaactttgcgagtgtccagtagttggatcagatgccaaccaaaagatgagtgaactggctgactgatttcacctttgttcagtcgcattaatgcgtcacggaaagcaggatcgtagatatcaggagccgtccagccgagatcaccaccacgcagggcggagcctggatcgtctgaaaactctttggcggcatcggcaaaatcagtttttccactgcgaatgtcactggcgatttgctgcaacttggtgcgcgcttgatcatcggtcatgacaggagaagttctcaatagaatatggcgggcatgaacttcagtgacggcgatggttggattaccgccacggatatcattaactttgagaatatggaaaccaacaccagaacggattgggccaacaacggcacctttctgagctaattgcagttgttcagcaaacagagttggtaactcctgaagcctactccaacccatattaccgcctttcagcgcttgtggatcggcagaataggcgatagccaatttaccgaaatcaacaccatgtttaagttcagacataattttctgcactaccgtcatggctttttccatctgcgcctgatcaggattttctggcaatgggatcagaatgtggctgatattcagttcagtatcgttagtattctggttgctaatttgtttaactaaggcgtcgatctcttgaggcaaaatggtgacacgacggcggacttcattattgcgcacttctgctatcagcatctctttacggatttgatcacggtaagtatcgaaattcattccgtcagcagcaatgcgatgtttcatttgatccacagtgatgtggttctgggctgcaatattggcaattgtagaatccaatgcttgatcaggaatggtgatccccatctgttttgccatttgtagcaggatattatctataatcagacgctcaaggatctgatgacgtagcgtttgctcatccggtatttgctggccggcatgttgcgcatcccgtttgacagattgtaagcggttattgatgtcgctctccagtaccaccccgttattaacaaccgcagcaattttatccatttgctgaggtgcagcgaaggcagtactcactgaaaacatcaatccaaaaatgagagttctccagttcttcatacttttcccatcatatgtaggttccgcaatagcgggtttatcgtgtttaatatcaaacctttattggcatcagaatgcacgttggtatggcatgatgccagactgcaacatttttctgctacccagactatgattgttacttaagccacgaagttcaaagttaaatgaccatttgttgtcatattcgctattgttgtctttccaaccaacaatcttacgttcatagccaacattaattgcccagcaacaagtgttgtactgtagccctactaactgacttgccggttgctgttctttggtatcgtaatagtaagcacctactaaaccccagcgctcacttaacggccaacttgcaaccagaccgacttgagagatcccttgctggaaagccggagcactcttagctgtagcttggatataatctctgtcaacaaaacgatagttcaactgcaccagtcggtcttcatcacggcgatattctagtactgcattccccatcgttacgttgcccaggcgagtatcgtactgcataccacctttcaagccccaagaatcattaattttccagtaagtatcacctgcccaggtcatcatgccggtactatctttactgttgatgatggtttctttaccagtgcgtggacgttcaaagtaatagatttgacctaatgacaggttaaaacgttcaaccaaactttcatcataaatacgggtagtgagaccggtagtcacttgattggccgatgaaatacggtccaggccaccataaaagcggtcacggaacaggccgttgtaatcagtttgcagtaaagatgagtcgaaattattgatattatcttggtctttgtatggcacatacagatactgaacctgcggttctagcgtttgggtgtaattgttgttcaggtacgttgaacgctcaaataccattttggcttcgcttttgaactgtggcagaacccggttaacagattctttatattcagcattctcggtagctttgggaatatcctgctgatagtgagtcgccatcagcttaacttcattattcatactggcccaaccattggagagtggcaggttaatggagggctccagatgccagcgggttgcttccgggttatttttacctacactggtaaattttgccgcctgaccataaactttaaggtcaaatggacccagatcgtttttgtaataattcaaatctaactgtggttctgctctgtaagcttttctactggtatctttagaaaaaatctggaactgtttagttgatagcgtggcattccagttttgttgagcatagcccagactaaatttttgtgtggcatagccatcggtggtggaaccatattgagagctgaaatcagaaaaatattcgggatcactgactttggtatagtcgatattaaaacgccataccctatccatcacaccactgtgtctccaataaaataaccagcgattatcactttctctggcggtacgtgtgtttgtctttttgtctttgacatactgttcgtcgttattcagccagtcgagagcaagggtacctgtgcctgctttggttaagtaacggaattcattatccagttttaaaccacgtttactgatatagtgcggtgtaattgtggcatcataatttggtgcaatattccaataataaggcagcagaaattcaaagccgtcatttttggaatagctggcgttaggaataagaaaaccggaacggcgtttattaccgatcggtaattgaagatacggactgtaaaatatgggaacgttagccaccctgaaacgggcattccatatttcagccacttcttcttcgcgatcgagaatgacttcggagccgacaacgctccagctatcattacccggcaggcaggaagtaaaagtaccgttatccagaatggcataacggttttcaccacgcagtttcattttgtctgcggtgccgcgtccttgacgcccgaccatctgataatcactttgatacatatcggtatctttattatttaaattagaccaagcgcgtggacctttcagaataatcaggggatcatcataatggacattgcccgttgcagttacggttcttaacggaactttatcttctgtttgatcaagttgtacctgatcggcagtcagggttttattaccctgtttaatattaacattaccgataaatttagcggaacgcggataatctgcgcgtgaatcatctgccagaatattgataggaagttgatttaaatcgccattaatgattggctgatcataaacaggtatacccagcatacactgcgctgcgagatcagcatgtgcatactgaccataaagtgcggcccataccgttgtggccagcaaagttggataacatttcttcatagatatttatgcggttccgtcatcagtggcattatgccgggcaaacctcaagagactagcgtactcaatgaatatacgccagtgtaaagtcatacctttacttatacccgtcatctttcaagttgcttctttgttggctgtactcactcaccccggtcacatagttagctatgctcccggggattcgctcctttgccgtcgcgatgcagcttgaaatccatagggtatatcttgtcgttaggcacagagctgaatgaatagtatgataatgcaaaactacactcagagcattggtgaattgaggagtatatgcattattggggaaaattgcttgggctgatctttggtgttgtgtctggagcaggcttctggggtattgtcattggtctatttattggccatatgcttgatagggctagtgtacggggaaaccaaggtttttttgcaaataatcagtctcgccaactgctatttttcagcagtacttttcaggtgatgggccatattactaaatcaaaagggcgggtgactgaaacggatatccggcttgcgagccagttaatggaacgaatgcaacttcacgggcaagctaggattgcggcacagcaggcttttcgtgaaggtaaagagcccaattttcctttgcgtgagacactaagacaattgcgtcgagcctgttttggccggtctgacttaattcgcatgtttttggagatccagttacaggcggcattttctgatggtcaattgcatccgaacgagaggacggtgttgtttattattgctgatgaacttgggatctctcgtaaccaattcgaacaattccttgccatgatggaaggtggccgcaatttcggtgatggaggcgagtggcagcaacggcagtatggcggttatcagaaggctgcgcaggggccaacactcgcggacgcctgtaaggtgttgggggtgcgtgaaaaggatgatgcgacgacaattaagcgtgcctatcgtagattgatgagtgaacatcatccagataagctggtagcaaaaggtttaccaccggaaatgatggagattgctaaacaaaaggcccagtcaattcaggctgcctatgatctcattaaaaaagagaagggttttaaatagcccattttttatttttaaaaacatgccactaaatgtataggggaataacatcccctacggctgttgagtttattttttattcctctaaaatattagaatattttatgttttattttgttttaacttaggaggaatgcaaaaaatggcaaatatccgtgttcttttggcttgttgtggcttggccttgtgtctgatattggcttcattggattcggttactgtatttgtctattaattaaaaatcggctttacactgaaaatgcattggcgttccatagaccggatgtgtgatatataactcttgtgcatgtaattgcaggcgaggtgccattgctcttgcctgctgatgagcgtaaaactggtctcccaaaattgggtgctcaagtgctagcatatgtactctgagctgatgtgaacgaccagtgatcggtgagagttttattcgagttgcctcatcttcgtaagcgagtacttcgtactcagtctgggctgatttcccggtttcaaaacacactttctgctttggccgattcggccagtcacaaatcagcggtaaatcgacaagacccgtttctggttccagacgtccccaaacccgagcaatataggttttttccggctctcgttcacggaactgacgtttcaattcacgctctgcatctttggtcagtgcaactaccattacgccgctggttgccatatccagccggtgaacagattctgcggctggaaactgttgttgtatccgcgtcataatgctgtctttatgctctgctgcccgaccgggaacagaaagtagcccactgggtttattgaccacaatgatatattgatcctgatagagcacatgtaaccaaggatcggtaggaggattataagcttccattgaggctccggtagctgaatattaggggaggcgcgggaatagggttcttagtaaaggttaccctatcccggtccagcctccgggtattactaatatttactgatgtgtaacgacaacaaggcgaatagcatccagacgccaacttgcctgatttaagttaagcagtaactgttggcgattggcttcaatggcttccaattcatcatcacgaatatttggattgaccgtcttcaatgcttccaaacgggaaagttcagcagcaagattttcatctgcttcctgttctgcttgttcaatcaatgattttgcctgagtttcgactaaaccttcggcttgttgcaaaatagcgtgaacttccttttgtaccgcattgaccagtttacttgcagtatgacgattcactgcattaagctggcggttaaagctttcaaactccacttgatcagctagattattgcctttcaggtccatcagtatccgcaatggcgttggtggaaggaagcgggtcaattgcaggcgtttaggggcttgtgcttcaacgacatagatcagctctaccagcagggttccaacaggtaatgctttatttttcaaaagggatactgcacagctacccgtatcaccggaaaggatcagatctaacccattacggataattgggtgctcccaactgataaactgggcatcttcacgggacagtgactgttcacgatcaaaagtgatagtacaaccatcttttggtaatccagggaaatctgggaccagcatatgatcggatggtgtcagcactatcatattgtcattgcgatcttcctgattgataccaacgatatcaaataagttgagagagaagttcaccaattcagtatcattatcatactctgaaattttttctgccagtcgcaaaccatgctcgccgccattggagttcatttccagcagccggtcacggccttgctccagttgctgtttgagttgctcatgttgctgacggcactgatcaataaattcaccaaatttttcttggtcctgattattgggtttggcaagatagttcagcagagcttcataatagtgatcgtaaatagtacgaccggttgggcaggtatgctcgaatgcatccaaaccttcgtgataccaacgaatcaggactgcttgggcggtattctccagataaggcacactaatttggatatcacggctttggccgatacgatccagacgtccgatacgctgttccagtaaatctggattgaatggtaaatcgaacatcactaattggttggcgaactggaagttgcggccttctgagccaatttcggagcatagtaatacctgagctccttcttcttcggaagcaaaataggctgcggcgcgatcacgttcaatcagtgatagaccttcatggaaaacagcaccacgaatcccttctcgctcacgtagtacctgttccaattgcagagcggtggttgctttcgcacaaattaccagcactttttcatggcgatttgccatcagaaaaccgagtagccattctacgcgaggatcaaagttccaccaggtagcgttttcgccttcaaactcttgataaatttgttctggatagagcatatcccatgcgcgtgcttccagcgattttttagcgcccataatatcggagactttaatggcggtctgatattgggatggcagaggcaactttatctggtgcaattcccgatgggggaagcctttcacaccattacgggtattacggaacagaatacgactggtgccgtggcgatccatcagcatggaaatcagttcacgccgtgcagtttcactttcaccactattactattggcagctttcagcagaggctcaatattctgctcactaatcaactcacccattaggtttaattgattattattaagttgttcacctgataacagcagtgtgacagcatcggcaactggacgatatttttgttgttcgtcaataaaagtctgataatcgtggaaacggtttgggtcaagtaggcgtagacgggcaaaatgactttcctgtcctagctgctctggtgttgcagtcaatagcagcacacttgggatctgttcagctaattgttcgacaacctgatattcacggctaggtgcatcctcgctccagaccagatggtgagcttcgtccaccaccatcaaatcccagctggcttcaagcatatgctcaaaacgctgtttattacggcgggcaaaatccagtgaacagagtaccaattgttctgtttcaaatggattatcgctatcgtgccgtgcttcgatatagcggctatcgtcaaacagggcaaagcgcaaattgaaacggcgcagcatttctaccaaccattgatgttgaagactatccggcacaatcaccagaacacgttcagcacgaccggccagcaattgctggtggatgatcatcccggcttcgatggttttacccaaaccgacttcatcggctaacagaactcttggtgcgtagcgcttgccgacttcatttgcgatgtgaagttgatgagggatcaagcttgcgcggataccccgcaaaccactttcagccagtttaaattgttcgctttggtatttacgggcgcgaaaacgtaaggcaaagcggtccatacggtcaatctgaccagcaaacaggcgatcctgtggtttgttgaaggtaagtttactgtcaaggaacacttcgcgcagactgatattttcttccagagtatcaagtcgtgtgcccgtataaatcagcaggccattttcttgttggatttcatctactttgagttgccagccttcatggctggtgacaacatctcccgagttaaacataacacgggtaataggagaatcattgcgtgcatagaggcggttttcaccgctggcaggaaagagcaaagtgaccattcgtgcgtccagtgcaacaacggttcctaatccaagttcgctttctgtatcgctgatccagcgttgaccgagggtaaatggcataaattttaactcagtttctgttagataatgttattcatgggtggaggacgacagctttttatttgatttaacggagataatgggcagacagcaagacaccccgttatttcccttatcactcgtcaaaggggcgatatgttaatggaagcaaagccagtcgtcacctgcaaaaaatagtcatcagccaaaaggcgttactatctgtccggtgagcgaaattgtaaagtcatcctgtaaagcggcaggatagcatcagcgataggctgaatttgctggttaatatcgtgatcatagtccggtgataaatgcagattttccagtagttctggctcgaagagtgtcatgacatagcttatcctgccactattttgatacggcaaagaccggtgatattacagattttacttatctgccagcgttgctgttctctcatgtggcggtacattgtgctgatagtcagacagtttacggcctaatcttttacagtaggttagtttatcatcaaattttccttccagggtactgataatatggtgaaaataaatttatggtaaggatttcggttaaaaaccagtgaatacagttgtttctggaaaattagcgttagactggcacagccagtacgtactgcttccagatttttagtattaaccatgcctatatagcatcggttttcatgcctagaatagctgcttcaggaacagtgccggcaaccagcgtatttgttaagccgtcataatggatattgccatcaacgattaataaagcgcgatcagctatacgagcggcatcatccagattatgggaaaccatcagtaatgtaagttggcgttcatggcaaacttgttccagcaataccagcatttcattacgcagtgccggatctagggcagaaaagggctcgtcaagtaataaaattggctgttggcgtactagacaacgggctaatgctgcccgctgccgttgtccaccagaaagttgagctggcagacggggcagacaatcttccaatgaaacttgtgagactatttgctgtaatgtctgtttctgcgtgctattgagacgtaatccgggatgtaaacctagcccgatattctgctcaattgtcaaatgagagaagagattattttcttgaaacaacatggaaaccgggcgttgagcaggtgatgtgctggtatgattttctccgttcagccatagggagcctttttctgctgtttgaaagccggcgattaagttcaggagtgtacttttacccgccccactagggcctaggattgcgatacgttctccggcctgaatgtgtaagtcaaagcgcatcatcagatgttcatagcggtaagtcagattttcaagtttgagcattacgtggtctcggtaagcgttcaagtaaactaaacagcgtaaaacataacaataacagcaataaagcagtgatcgcgccatcctgactacgataagccccgatttgctgatagaggtagaagggcagggtacggaaatcttcattaccaaacagcgcgacaacgccaaaatctccaatggaaaggacacaagcaaaggccagtgcttgtgccagcggaacttttagtgcttttagttcaatccagcgcagtcggttaataccttggatattcagggagcgacacagtggattatagcgagccgccagatctttcattggattatccagaactttcagtgcataaggaattgccatcagtgcgttggttaaaatcaccagaccgtagggtgaacggggcaagccgacggtatcattgagcaacagaaagaatcctgttgccaatacaatgcctggcatagagaggattaacaaaccactcatctccattacttgtccccaatggggggaatgacgcaggtacagctcacggctgctccacagcagcatcatagtgaataaaacgcataataaccccgcgcctaaagcaatcaccgctgaggtgataaaggctcgccacaatgcaggttggcgtaatacattaagcaacccgctgttaaggccatccacgacaacggccagcaatggtggcacgagtagtaataatgcggcgataattaacaagctgtcgcagatttttctcaacagagtatcttgtggattacgccattgctgttggttgctgtagccgacagatagagcactgttaagtttctgactgaggagcacaaggccaaggcagcaggtaatctgaatcaacgccagtaacgcggcacggttgagatcgtagtcatagcttaacgcctgatagattgccagttcgacagttgttgcagcaggtccgccacctaacgccagcacagtcgcaaaactggcgaaacagagcataaaaatcagtgcaccagtgggcaggatctggcggcgtagataaggccattcaacaaaacggaaatgttgccattcattcatacctagctgcgccgctaattgccgttgttccaccgcaatattttccagcgattgcagtaaaagccgtgttgccagtggcatattaaagaaaatatgtgccagcaaaatgcctgataaaccgtaaggggtgaaagggtaatcgatgccgatccatttgcagaactgagccagccagccggttctaccataaaccgccagaatgccgaatagagcgactagcacgggcaaaaccagcgtcatagcacacaggcgcagaaagagggtccggcctggaaaatgacggcgatagagtgctctggaaagaaaaatagccggaatgacagaaaatagtgctgataaaaaggcttgccagaatgtgaaacgtaccacgtgccacaaatagcgatcttctatcaataaataccaatcacttgcaggtgaattaaaccagagcgttccgaatgccagtaaggcgaccaacagtaaaaaaccggcggcaatcgcccccggtaacagccatccggctatcagcggctgacagcgctttgccatgtacgaatccattggttacggtattttgcgacttcttccgcgcgatattgtagcgatttttcgggtatggaaagctgcaaatatacttccgggagtgggatatcaatgaccggatacatccagttagtggttggaatttcctgttggaaagttggcgtcagcataaactgcataaatttctgggcaagttccggttgcttgctggaggccagttgtgcggccacttcgatttgaaggtaatgaccttcactgaatgtagccgcagtgtaatcgtcattcttctcagataacaggtggtaacccggtgaagtggtgtaactcagcaccagatcgccttctcctttgaggaacagaccataagcttcgctccagcccttggtaacggtgagtgttttctttgccagcttttgccaggcttgtggggcatcatcaccgtaaattttctgcatccataacagcaaaccttgccccggtgtgctggtgcgaggatcttgatagatcactttccagttattgtggctgttgatgagctcatccatgctttttggtgggtttggtaaagtctttttgttgtaaatgaaagcaaaatagccatagtcataaggaatgaataccttgttattccatgacactggcagtgtcagtttgctggtatccacttgactttcagtaaacagccctgtttgttgggctgcttgaatcaagttgttatccaacccaagaataatatcggcagcagtacgcttgccctccattcttaggcgattgagcaaggaaacaccgtcttccagagcaaccagtttcagttcacagtgacattcagcttcaaatgcttttttaattgcgggcccgggtccccattcagtggcaaaagaatcataggtatagaccgttaatactggcttggcctgtacaacttgacttaatagcaacgcaggagctgatagggctgccagtacgattaatttggaaaataacgtcttaaacactttgctctccttaaattaagaggattggcaaaggatttgaggaagcgctaaacggcaagataacgtctgtgaaatagttagcagctcaaatccctacgccggtattagccggatcaggttcggcgggtttactctcagcaaggctgttttaaacagccagcaccccgttgagatggcgctattgtagagatttagctagcgactgcaaagtccaatgatagaggtttaccacttgagggtagtgtgaaacaattagtcatctttcaaatttagtttatcgaggtagtctggtgatcgatgatgatggctaccgcccgaatgtaggaattgtaatttgtaatcggcaaggccaggttttgtgggcccggcgttatgggcagcattcctggcaatttcctcaagggggaattaatccgggggaatcaccagaacaggctatgtaccgggaactgtatgaagaagtggggttaggtcggaaagatgtacgcattctggcctctactcgtaattggttacgttacaaattacccaagcgtttggtgcgttgggatacacgacctgtctgtattggtcaaaagcagcgatggtttttattacaactgctctgtaatgaagaagatattaatgtgcaacacagtaataccccggagttcgatggttggcgttgggtcagctattggtatcctgttcggcaggtagtctcttttaagcgtgatgtttatcggcgcgtgatgaaagagtttgcttcggttgtaatgccaatgcaggaaagcgtatctctgccacgttcttcgtattcttaccgtcgtaaaagaagttaggtgagttccatgctcatgcgtttacgggaaattgttgaaaaagttgctatggcaaccaatctggccgaagcgcttgagctattggtgaacgagacttgtctggcaatgaacacggatgtctgttctatctatcttgctgatcatcaacggcggtgttattacctgatggcaactagagggttgaggaaaccccgaggaagggctatcagtttggcttttggtgagggcgttgtcgggcaagttggtcaattgtctgaactgattaatctggcggatgtccgcagccatccaagtttcaaatacttgcctcaagttaaagaggatagttttcgcgcttttttgggcgttcccgtggtttaccgccgtcaattgcaaggtgttttggtcgttcagcagcaggaacaacgcttgtttaatgaaaccgaagagtcctttatggtgacgcttgcgacacaactcgcggtgatccttgctcaagctcagactaaaggcttgtttggtcgatatcggcagaccagaattaaagccttggcaatttccaatggcatcgtgatggctcagggatggcaagattgctcccagccctcacttgaccaaatttttgaagcctcaactcttgatcatgcagcagaacgttctcgtttaattcaggcactggaagatgcaatagcagaatgtcgtcggctcagtaaacgttttactgtgggttctcaaaaagagagcgccgcgatttttgatctttattcctaccttttgaatgatccccagttgaaacaagatctgttctcctgtgttgaacagggctctgttgcgcaatgggccgttaaacaagttattgagaaatacgcagaacaattttccagcttgcaggatgcttatatgcgggaaagagcatcagatttacgggcacttggacagcgattattatttcatctggatgattcacttactgccagtcatcaatggcctgaatggttcattctggttgcagatgaactgagtgctaacctattggcagaaatgccgcaggaaagattagcaggggttattgttcgtgatggcgcaactcattcacactctgccatattggttcgagcaatgggtattccggccattatgggggcggatatccagccggaactcctgaacaatcgtatgctaattcttgatggtttccgtggggaagtcttcattgaacctgagccactgatttcgcaggaatataaacagattatcgaagaagaaaaggcacttagcagattggctgagggagatgtggagcaggaagcacggttaaaaagtggcgagcgcattttggttcagcttaatgcgggtttgagcctgaaatatgagttgcagatcagtaatagtattgatggtgttggactctatcgcaccgaaataccctttatgctgcactgtggtttcccatcagaagatgaacaaaaagcgcgttatcaggagatgttacaattatttcccgataaaccggtggtactgcgtacacttgatattggtgcggataaacaactgccttatatgccgatcagcgaagagaacccttgtttgggatggcgtggtatacgagtgacgctggatcaaccggaaatttttcttatccaactgcgggcaatgctcagagctaacgctgatatgggtaacctgaaaatcctgctgccaatggtgacgagtgtagaagaaattgatgaagctaagcgattggtagacagagcgaaagaggaagttgagcaaatgctggcgcgccaaatatctatgcctcagctcggtgtcatgattgaagttccttcgatgatttttctgttgccacaactcaaaaacagagtcgattttgtgtctattggcaccaatgacctaacacaatatctattggcagtggatcggaataacactcacgtcgcttctctttatgattgcctacatccggcggtgattcgggcattaaaactagtatttgaaaatagccagcgggcaggtcttacgatcagcatttgtggtgaaatggcaagtttccctatgggagcgctgntattgattggtcttggtatcgcagtttgatatgaatggttgtagtgtgccaagaattaatatttattacgtcatctggagttggctcaggttgaaaaattaatggccgaaatcttacaagctgaaaccagcctaagagtgaaggagctgtcagcaacatttatggagcagcatggggtgggcggtttggtcagaggtggcatttaatccgtttaacggcctgtgctatgattctcaatcacttgccttagggcattaacgctaaatattaagtggggaaagatgagtaacagctacctggcatttcctaatattgacccggtcattttttcaataggtccaatagccctccattggtatggtttcatgtacttggttgggtttgtattcgccatgtggctagcgacacgcagggcagcgaaacccaatagtggttggacaaaaaacgaagtagagaacttgctttatgcaggttttgctggcgtatttgttggtggccgtctgggctacgtcctgttttataatttccctgcctttctcgacaaccccctttatttgtttaaagtttgggatggtgggatgtctttccacggtggtttagtgggggttatctgcgcaatgtggtggtttggccgcagaacgaaacgccatttcttacaagttgctgacttcattgccccgttagtcccttttggtttaggcatggggagaatcggtaattttattaacggcgagttgtggggacgtgtcacattggatacgccgtgggcgatgttattcccaagctcccgtggtgaagatattgcattggctgcaaccgatccctcactgttatcagtacttgagcaatatggtgttctgccacgtcacccttcacagctttatgaaatggcgttggaagggatcgttctgttcattattttgaatttatatatccgtaaacctcgcccaatgggcagtgtttccggtttattcttaattggctacggtattttccgagtgatagtcgagttcttccgccaaccagatgcacaactgggcttattcgacgggatcagtatggggcaaattctttctataccaatgatcctggcgggaatattaatgatgatatgggcatataaacaccaaggtaataaggtacaagaggtaaaatgaaacagtatctggacttaatgacaagagtgcttgcagagggcactccgaaagcagaccgcaccgggacggggacactctcgattttcgggcatcagatgcgtttcaatttacaggatggttttccactggtcacaactaaacgttgccatatccgctcaattattcatgaacttctctggttcttgaatggtgataccaatattaaatatctgcatgaaaatggggtgactatttgggatgaatgggcggatgaaaacggtgatttagggccggtatatggtaagcaatggcgcgcatggggtaccgcagatggccgccagattgaccaattgaaaactgtactggaacagcttaaaagcgatccagattcacgtagaattattgtttcggcttggaacgttggtgaattggataagatggcattagcgccatgccacgctttcttccagttttatgttgcggatggcaaactttcctgtcagctttaccagcgctcctgtgacgtattccttggcttaccgttcaatattgccagctatgcattgctagttcacatgatggcgcaacagtgtgatttggaagtaggcgattttgtctggaccggtggtgatacgcacctttatagcaaccatatggagcagacaaaattacaactcagccgtgaaccgcgttcactaccaaaactggtgataaagcgtaaaccggcatcactttttgattataaatttgatgactttgaaatagttgattatgacccacatccaggaataaaggccccggttgctatttagcggttgcggttaaaatagcgcttctatgttcgtcgacaatctggaggaacaatttataataaattgttcctcttttcattttgatgatataatatacagatacgtagaaattaagaggaaaaagaccatgaatactatttcccaaaaaaaagctagggatctgcttagtaatccaaagcatttcgagggtggtgtgtttattaccaaaaacgggatatctgaattgtttattcaaccaatggcagaacgtgagagagagttggccgaaagaggcgtagaacgacaggcgatagcattgcttaaaatcgcgatgttgtctaagaaagatactatagaaggtagaaaaatgacacttgaagaagcacttcgtaggcgcaaggaacgtcgggtgtgatatataaagttcaaattaccgaaacagcctaccagacactttctattattgaagactacaaggctaatactatagggttggaagcagctcagaatttggtggatgatttattaattgaatcatcggaacggataggggagaacccgttagcatacggctattgttcaatgttgctggataaaggaatgcaatttcaccaatggctttccaaagatcggcaatttcgtgttatttatgatgtagttggggatgaaattcaaatattggcatacgcaagcacaaaccaagatttaattgccctcttgtaccaactactgatcatacactgatatacccgttatctttcaagttgcctctttgttggcggcactcgctcaccccggttacatagttcgctatgctcccggggattcgctcccttgccgtcgtgatgcatcttgaaatccatagggtatatttaaaatattgaacgctatacttaatacaatcttctcaattaattattttctggtctgatattatttatatttagaataagttaataaaaatgacattatcatataaaagcgtttgatcttatattcatgaagcttcttcctcatagccatataatcttacaatgtatgaaaataataagaaacaaaaataactattctcgttgatttttgcgaagctctacgcaatttaaatgtaacaatgataaactattatttttttattgatgcactctcgcataaaatttaattgtgtatttattttgtgtttaaaatgaataaaatgttttacgaaaggaaataaggaattatcaatggtaaataatgtgaatataatcggccattataatattgataatcaatcaggtttttctttattggaattaatggtcgttattgttttggtgtcaatattttccttatggggcgtacaggaatggggctatcaccaggaaagagtcaggttacaggaatcagcacagaagatattgacatttatatccaggcaacaatctttggcaaattatttgaacaaaagggtgatattgtggttgaaaactggcaaggattggtgcatagcgttctctaattcggtattagctaattgtaatttagaaaatgttgagggaataaactcaccctatcaggatgttattatcagttcagcaaccaaggatcagatagagtttcatggaataagaaacaccatgatacctgcgagttttactttggcgaattccgcaggtgaaatatccattattttttcttcacgaggtaggataagatcatgtagtaataataagtttaatcaaattccagcttgtgattagttaaatttttcccactataccctatggatttcaagatggatcgcgacggcaagggagcgaatccccgggagcatagcgaactatgtgaccggggtgagtgagtgcagccaacaaagaggcaacttgaaagatgacgggtataaataagagatactttaattggaataatgaaacataaaaaccaatctggaatgacattattagaggttattgtagcaatggctattggtagtattatcttactggcgattgctaaaagttaccctattttaactaaacaataatggagtatatcagagatatcggttaggctattttgttaaacaaacgttacatattatagaaaaggatattcgccgtgctggatattgtcagcattattgtgatggaaagccaatattcatcgataataaaagtgatgagagtgaggattcatgtctgattattgcatacgatcttaatataaataaccaatgggagccgccagaacacagtgaatcggaattctttggctatcgtcttagcaataagtcagtagagtggaaaaggggggcgggtaactgtcaggaaaatggctgggaaaggctgtttgatccaaatgagatagtggtagattcctttaaagctgaaaaattaccggcaaaagatggcttagtttttatcaaattggtacttattgcacattggtttaaacatccatcgataaactaccaatatcagtcagtaatacgtttgcgcaatatcaggggataagtaccgtggctgagcattctccacatgtctgttttcaatatcagcaaggtaatgtattgctcatttcagtgctgatattattgaccgttagcctgatgatgttaaaggctttgcatcatcatctggataacgctttaatcatgatggtcgatgaacgcagatatctaaaagcttttcagcaagcagaatcttcattggcatggggaatcgctcagtcatggccacttcatagtagtcaaatagaagatagtaataaaacagaagagtggtattgccagcaacaacaagaatttcatttgaccagttgtttaaaaaggcaatcgagtcatttttttctactaaaaggtatggctgatgtggcacccgggcaatctgttggattatatcaatggatgaaattacactcatctggtggagatgattctcttattccggtagagagtggttggctggatttttgtcctgaggtagatgtgggattttgttcatgaagtcagagcttttttatgagcatcaagcaggcatgagtttgcccgaagtaatgattgctgttatggttttttcggtctctttattgggattaatgcgttatcatcaggcgttattatttgggtttcagcaacattggcagcaatcaaaggcagataaattatcttatggatatctggaacaatatgaattaattgcaggtcaaaatgctttaccagaaataacattgccaccgggatggcatgctgaatttcagacggcctatccgttgtctagctgctatcagcttacagttatagtgatgacgccttataatcagcaaagtaaagcaagccgattgatttgttcaaatgggagttccgatgtttaaggtttatcattctaatcaattagatcttcttaaggaattgatagcaatattgatcgggggtaacccactgactgatccatttgcgcaggaagtcattttggtacaaagcccaggtatgtcacagtggctgcaaatccaactggccgaaagaataggcatatcagctaatatttcatttccgcttcccgctacgtttatttgggatatgtttaccaaagtattgcctgatattcctaaagaaagtgcttttagtaaagatgctatgacatggaaattgatggcgttattgcctcaattgctgcctgaagcagagtttgttggactcaggcactaccttgatcaagattttgataaacggaagattcatcaattagctggacgggttgctgatctgtttgaccaatatctcgtttatcgcccgcaatggttggaaagttggcagcaaggtcagcttattgatggtttgagtgataatcagttgtggcagaaaagattatggctggaactgacgaaatatactcaccagttacaacaacctcaatggcatcgtgctaatttgtatcagcgttttatttcgatactggaaaataatactgaacaggaaaatagtactgatttttcagcttgtttaccgaaacgggtatttatctgtggcatttctgccttaccaccggtctatttacaagctttacaggcattggcacggcacattgatattcacctgatgtttaccaatccatgtaaatattattggggagatattcagaattatgcttttttggcaaaactgagtagccgtaaaccacgtcattataagagcgaacaggagctggaatattttaaagatcctgataatgctcaatcattgtttaacggtgacggtgaacaagatgtcagtaatcccttgttggcatcgtggggacggttgggccgtgataatctctatttattgtcgcagcttgagcagagttcggatattcacgcttttgttgaattagaacaggataatctattacatcaattgcaaagggatattctctatctggaagatcatgcccaaattggttcaacaaaagaaacatttgaaaacagtttgaaaaaaagagtacttgatccgttggatcgttctttatctttccatgtttgccatagccctcaacgtgaagtggaagttttacaggatcagctattgagattattggaagataatccatcgctgacgccaagggatattattgtgatggtcgcggatattgacagttatactccctatgttcaggcagtatttggtaatgtctctgttgaacgctatattccatttgctatttctgatcgtaaagctcgtcaggcacattcgattttacaggcatttattacactgcttgatttacctcaaagccgttttacaacagagcaggttttagcattgttggaagtacccgcgctggcgaataaatttgacatacatgaagatggtttgcgtttgttaagacgttgggttgaagaatcaggtgttcgttgggggctgaatgacgataatgtcgaagagctatctttaccggtgacaggtcagcatacctggcgttttggactgacccgaatgttattgggttatgcaatggatagccgatcgggcccttggaaagaggtattgccttatgatgaatctagtggtttagctgcggagcttgccggccaattggctgaatttttaatgcaattaagctattggcgcaaaattcttgctgagagccgggcattaacgggttggttacctgtctgccagcagttgctggaaacattttttgtctcagataatgagactgaattagtactagcaatgatagaacagcaatggcagaaagtcatagtcaatggcttgaatgcccgttatcaggaaagtgtgccattggttttattgcgagatgaattggcacttcagtttgataatgaaaaaatcagtcagcgttttctcgccggatctgtcaatttttgcactctaatgccgatgcgttctattccctttaaggtcgtctgtttattgggaatgaatgatggtatttacccccgttcaattccaccgcttggatttgatctgatggcggaaaaaggtcagaggggagacagaaaacgacgggatgatgaccgttatctattccttgaagctttgatatctgccgaacggtttctttatatcagctatattggtaagtctattcgtgatgatacggaatgtaatccttccgtgctggtgaatgaattactggattatgtttgccaaagtttttgtttaccgggaaatgaaaaactgaatgttgatgaaagtgctacccatgttagaaaacatctgttgtatcttcatgcccgcgttccatttgcaccggaaaattttataccgggcagttatcagcaaagctatgccggggagtggttaccggcggcaactgaacaaggtgcagcatacgctgaattttgccaatctattgaaatggcgcaaattcaagaaattacacttgataatttgagcagtttttaccgccatcccgttcggttttttttccaacgttgcttgaaagtaaatttcgttattgaagaaacggaattaccggaggaagaacctttcgttttagataatcttcaacgttatcagtttaatcagctattgttaagtgcactaattgaacagcaatcgcctgaaccacttttcaatcggctgcgtgctgctggaggattaccttttggtgcttttggtgaggtttattggttaagacagcaaaaagagatgcagcctttggcggataaaattcgtgaacaacaaatggaaactttatctgtcgatttacatcataatttaggcccggtgattctgacagggcgtattaataaggtgcaaccggatggcttgctacgttggcggcctgccagtttgacagccaatgatggcatgcaattgtggattgagcatctggcttattgtctgacaggtggtgagggtgaaagtcgcagctatgggcgtgatggcaacgaatggcgtttcgctcctgtaccttcagagtacgctaaagattatctgaatcaattgattgaaggctatcagcgaggaatatcagcacctttaccgctgttttgtaaaagtggttgggcgtggctttcagcatgtatgaataaagagactggtgagattgatgatagtgatgaaattcaatcaaaggctgaaagtcagttattgaaagcatggcttggcgatcagggacgcagaggcgaaggggatgatccttatatccaacgagctttcaggcaagtggataaatcatttttggcaaaatttaaacaggaagcgctcagttatttgttaccgatagcgcgatatcagaatacatagagagaatatcagataatgcataaacattttgttcgcatgattactgtgatgttcctgcttttttggggaacgacgagttatgcgcaaacaccacaatcatcacaactactgcaagagacaatttataaaagcgagagtgatcatcgtcagtatcagggaatcaaactggcaaacaatatgacggtcttgctggtatctgatgagaaggcaaccaaatctctggcagcggtagcaattccggttggtagtatggaaaaccctgacagccagctcgggcttgcacattatctggaacatatggttctgatgggatctgaacgttacccacagtcaggtgatttatctgaatttttgcaaaaacatggtggtagctataatgccagcaccgcttcttaccgcacagctttctaccttgaagtagaaaatgaagcgttagctcaagccacagatcgtctggctgatgcactggctgagccgttacttaatccagtgaatgcagatcgggagcgaaatgcggttaatgcagagctgacaatggcgcgttcgcgtgatgggatgcgggttgctcaaatacgggcagaaaccttgaatcctaagcatcccaatgcccgtttttctggtggtaatctagaaacattaaaagataaaccggggagtaaattacagacagaactggtggatttttatcaacgctattattcagccaacctgatgaaaggtgtcatttacggtaatcagcctatcgataaactgactcaaattgccgttgatacttttggtcggataccggatagaaaagcgagtgtgccggtgattactgtgccagcagtaacggaaaaagagaaagggattatcatccattatgttcctgcccaaccgcaaaaggcattgcaattggaattcagtattgacaataacagtgctgatttccgcagtaaaaccgatgaatatctcggttatataataggcaatcgtagcctgaatacattatcagattggctacaaactcaaggactagcagaaagtatcagtgccggtgcggagcctatggttgatcgcaacaaaggtatcttttttatttatgtgacgttgacagataaagggcttgcacaacgggatcagattgttgcggctatttttgcttatattaatttattgaaacaaaaaggcattcagaaaagttattttgatgaaatcgcgaaggttttgaacctatctttccgatatggttccgttgttcgtgatatgcattatatcgaatggttatcggatgctatgttgcgagttcctgtttccaatgtactgaatgccggttatttagctgataactatgacccgaaagcaatcgccaatcggcttgctgagttaacacctgaaaatgcaagaatctggtatatcagtccaaaagagccacacaataaacaggcttattttgttcaggcaccttatcaggttgatcgaattacattgcagcaacgagttaaatggcagcaattagaggagcagatgagcttttctctgcccgcaccaaatccttatattcctgacgatttgaagctgataaaagcagataagagtaaaaaacatccagaaatgatcgttgaacagcagaatgtccgcttgctttatatgccgagccaatattttgctgatgaacctaaagccagcattacgcttgatttgcgcaacgcagaaggtttgaatagcgctcgtgagcaggtcacttcctctttgcttgattatttggcagggctttcccttgaccagcttagttatcaggcttctgttgcaggaatgaatatttctacgggctcatctcaggggctgcaattaggagtaagtggttacactcagagtctgccagcgcttttaacctctttaatcagtaattacatggcattcacaccaactgaggagcaattggcacaggctaagtcctggtatcgtgagcagatagcggtttctaataacgctaaagcttatgacatggctatgcagccgttgaagcgcctttctgtggtgccttacattgaacaatccacccgtctggaagcgctggagactatcacggttcaggatattgttacgtatcgtcatgagatgataaaaaatgctgctttgcaaatgatgatcattgggaatttgaccgaacagcagagcaaagtgattgctgaatctgcccataaccaactggcaaatcaaggaaatgattggtggagtggggataaggtggtgattgataaaaattacccggttaatttccagcgtgttggcagcagcacagatggtgctttagcagaggtttatattccgacgggttataaccgtatagaaggttatgtttattccagtttgttgagcaacatgctccagccgtggttctatgagcagttaagaacagtagagcaactggggtatgcagtgtttgctttcaataccagtgtgggggaacagtgggggttgggtttcctactgcaaagtaatagcaagcaaccaaaatatttgaatcagcgttatcaagatttctatcagaacgtgggtaataaattgaaagccatgcctcaagctgattttgagcagtacaagagtgcgctgattaatgaaaagcagcaaccgccacaaactttctatgccgaagttgcccgtttctccggtgatttcagtcgtaataactttagttttgacagtagagataaaatgcttgagatcctaaagaaaactacacagcaacaattgattagtttctatcggaatgcggtcatcaaacatatagggttgtcattcatttcgcaagtgattggtaaatcaggaaacttggatggatatgcgaaattgaaaggttggaaaacctatcaaaatgtgactgaatttcagaaacggttacctgttgaggtaagagctcagtgatcacagagatatctgtccacaggcttaatgtattaactctgccgctgactggtcagcggctgatcgaagcatcggccgggacgggtaaaacctacaccattggcattttatatctgcgtcttctacttggactggggaaagatgccgctttttcacggcctttaagcgtggaagaaattctggtggtgacttttactgaggcagcaacaaatgagttacgtggtcgtatccgtgaaaatattcataaacttcgccttgcctgtattcgaaatgcaatagaagagacagaacctgcctatcaacagctattgaatgaaatcccggataaagggcaggcggctatttggttactcgccgcagagcggcaaatggatgaagcggcgatttataccattcatggtttttgtcagagaatgttggcacataatgcctttgaatctgggattttgtttgaacagacattaattcaggatcaacatccgttagaacggcaagggtgtgccgatttctggcggcgacactgttatccattgccgttatcaatggcgcaggtgatcagccaggagtggagtgggccggaagccctgttggctgaattatacccttatttacaaggggatatgccatatatggttgatgcgccagccagcgatgaaacgctgttaagtcgtcatgaaaaaattacccagttgatcaacgatgttaaataccaatggaatgaagctgcgggagagttgcacgatttaattgcgggttctggtgtcgataaaagaagttacagtagtaagcacttaccaaattggctgaatagtgtcatggattgggctcagacgcctacagaggattatcagttgccaaaagcgctggagaaattccggcagtcagtattggcagaaaagacaaaaaaaggtgaggtacctgaacattcactttttgttgtgatagatgatttatatcagaaaccacttactttacgtgatttgattatctccagagctattattgaggttcgccaatcaatccgtcaggaaaaattaacacgtggtcaaatggggtttgatgatttactaacccgtcttgatgatgctctgaaaggtcccggcagtgatttgcttgctgagacaatccgccgacgctatccggttgcgttgatcgacgaatttcaggataccgacccacagcaataccgaatttttcataccatttatggcactcagcctgaaaatggattgctatttattggtgatcccaaacaagctatttatgcatttcgcggcgcagatattttcacttatattcgtgcccgctctcaggtaagtgctcactatactctggaaacaaactggcgctctgcctactcgatggtacaggcagtaaacaaactgtttatgcgttcagaaaatccatttttgtttgagcagattccttttattgaagtttctgcggcagagaaaaaccgagagctctcttttagctatgacggtgaagaacaggccgcactgaatttctggttacaaccaggagaaggtgtttctatcggagattatgagcaaacgatgtcacggctctgttctgcgcaaattcgtgattggttgcaggcaggtagtgaagggcgggctttgttacataaaagtgaaggttctcggcctgtgacggcggctgatattacggttttggtgcgtagtagaaaggaagcgacactgatccgtaatgcacttaatctgttatctatcccttccgtatttctttctaaccgagaaagtgtatttgataccgtagaagccaaggatattctctggttgctgcaagcggtgttatcaccagagaaagagcgggtgttgagaagtgcgcttgccagtggtttgtttggtttgaccgctcgacagatagacaaactaaatcatgatgagaagacgtgggaccagttagttgatgagtttgatggctactttcgtctgtggcaacgccgtggcgtgttacctatgctacgagcggtaatcgccaaccatcatattgctgagaatttgcttgccagttatgacggtgaacggcgcttgacagatgtgatgcatattggtgagttgttgcaggagatatctttacaacttgacagtgaacatgcggtcactcgctggttggctcagcaaatctctcatcctgatccacaatctgaaaatcagcagatacggctagaaagcgatcgtcacttggtacaaatttgtactatccataaatctaaggggctggaatatccgctggtatggttgccatttatctgtaatttcagggagcagaagcgggcgatatatcatgatcgtacaagctttaatgcttgcctcgatatctttcctgacgacgagacgattgaactggcggaacaagagcgattggcagaggatttgcgtttactctatgtcgcattgacgcgttctgtttaccattgcagtgtcggcgtggctccgctgataaaaggcaataagaaaaaggccggggatactgatctgcatcaatgtgctctgggctacctgttgcaaaagggggtgaaaggggatgctgattttctggcaacatcgcttaaagaattaagcggagatggcattgttatatcatcaattaatgagactgatgatcacccttggcaatcgcaaagtaaaaatgatttagtcctgtcggccaggcaatttaaacgtagagttcaggatgattggcgtattaccagttattctggtttacgaaactctgtagttcatcgtggtaatgcttccgcttattttgctggagaagaatctattgacgtgattgttcagtctattgcgccaaaacttgatgttgatgctagtggtgaaagacagttagtagaacaacctgaaatgacaccacatacattcccacggggagcttccgcggggacttttttacacgctattttggaagaacttagtttcagccaattacctgatgagaaatggttggcagaacaactgcaatcagccggatttgatgaacgctggagtgggacattacagcaatggatggtcgatatttttactattccattgaatgatgaaggagtgcaattggcaaaaattccgctacatcatcaacaggatgaaatgcaattttatctgccggttgaacaacttttgcgatctcagatgttggatacactgatacgtcgttatgatccaatttctgctcgctgcccccaactggaatttcagcaggtgaaaggagtgttgaaagggtttattgatttggtcttctgttggcaaggtaaattctacctgctggattacaaatcaaactggttgggagaggagagtcagttttatactcgccaggcaatggaaatagccatgattgagcatcgttatgatctgcaatatcaactttatacactggcattgcatcgttacttgcgtcacaggctggctaattatgattaccaacaacatttcggcggcgtgatttatctgtttctgaggggaatagataaacaacagccggggaatggtattttcaattgtcggccatcggctgaatttgttgatgctttggatctgcttttcagtggtagtgaacagcttgagaaagagaaaaattgatgatttcgttattacaacaagcagtaaacctcaggcttttgcgttcattggacttacagtttgctcatgtattgattgaggataaagatcctgttttgttgttggtgatggcgctgttaagcgctgaaaccggtaccggccatgtttgcctgccggttaatcggataacgcctgaatatttttttgatgggcgacatcgtgaatttgccgaacagttatggcaggttgcgggaaaacctgatgagcagagtttgcggatagcactggaaaattgtgctgcggttagtgatggatttcaacccacgcctgttgtgctttcccatgatcggctttatttgcagagaatgtggcaaagtgaatgtcaggtggcggcttttttttccggcaatcaaccaatcgataatattcaggaacagcaactgaaagttgttttagatgaattattcatgctatctgaggaaatggtggactggcaaaaaatggctgcggctgtcgcggtgactagcagaatttcggttatctctggcggaccaggaaccgggaaaactaccaccgttgctaagctgttggctaccttaattaaacttgaacctgataaaaagcgggttatccaactggcggctccgaccggaaaggcggccgccagattgaccgaatctcttaatagtgcggtcagaaaattgcctctgacggaggaacaatttgcatgtatgccggatcaggcgcagacgattcatcgcttgctaggagcgcagcctgatagccagcgcttgcgctatgatcgagataatccattgaaccttgatgtgctggtggtggatgaagcttcaatggtggatttacccatgatggctaggttgattgatgcattgccaccgaaagcgaaaattgttctgcttggtgaccgagatcaattggcatcagtggaagcaggcgcggtgttgggtgatatttgccgttttgccgaactcggatatagcgtaacgagggcgcaacagctaagcagattgacgggatgccggttagttgcgggtgatcagcaaaatatcccagaggttcgtgatcgtttgtgtcttttacgtaaaagttatcgttttaatgtggattcggggattggtcaattggcgacggccgttaatcagggaaagagtcgacaagctctcgctattttgcagcaaccgttgaaggatatctgtttttacccattgtctgacgatgaagattatcagcggttgttggcagaaacggtatcgggttattacctttacttgcatctggtggcaaaacaggcaccagtcaaagagattttagatgaatttaaccgctatcgtttgttgtgtgcacttagagaagggctgtttggtgtcagtgggcttaatgagcgtatagaacagctattacatcgtcaggggcttattcgtcgtccagtcgggactttcagccgtggttatgcagggcggcccatcatgatatcgcgtaacgacagcacattgggcctatttaatggtgatattggtattatgctcagagacgaaaatcatgaactgcgtgcttattttcaactgcctgacgggcagattaagggagtccagccaagtcgtttaccacaacatgaaactgcgtatgtgatgaccgtacataaatcgcagggctcagaatttgaacataccgctttggtattgccaacgcaatttgtgccggttgtcagccgtgaactggtttatacagcgataacccgtgccagagaaaaactgactctttatgcacatgaagcggtattgcgtcaggcaatccagacaccaactcaaaggcgaagcgggttagcagagcggcttagcttacaggtggattagtacttattctgatagactaacttgtgcaaaaaaatttatatattaacgatgttgccatatcttctctgacatttttttgatcgttatttgttctgttgttggatgggattttaagcccgacaatcagatcattaatccctttaatgagatttctgatttgccgtgctgacttcggtaaatatcccttttcagttttgtaaaaagttctcgattgggtgattgaaaaattctcgtgcagtgaattagagattacattgacctatgcaagataaaggtatcttaaacctacctatatgccaaattttggttaatttctaactgaaatatcttttcttagtccttcatgttgattgattgtgagtcgtaatcgttcagtcagcaataccgagtagtttcatcgtgatggctatatacccgtcatctttcaagttgtttctttgttggccgcactcactcaccccggtcacatagttatctatgctcccggggattcgctcccttgccgccgcgatgcatcttgaaatccataggctatatactgatcgatatcttaatttcaccgattcaaaagattcaaaaatagttgcaatgactgaatcaaattgctgatgtttatgttttgttatcaatgtaaacaataaaattataaatttaataaattttaatattattgtgtggttaatgtcacagtttgtgaatatattaaatgaaatttattattatttgatgatataaacgcctaattatatgaattgtgatttgtttactaaacggattgcggatatgtctggatagcttgctaggggtgagatgaatatccagatttttgatttaaggattaagttgtctgatgcaagataatgaaatgagtactgagtcaccccactcttccccggggctggacaccggcctgatttgcctggcaatgttggccaggtttcacaacatcgctatatcgactgaacaactttcacacgaattttccactgccagccaaggttttaccctgaaagagctgctgctggctgctcgtcattcagggctgaaagccagggctgtacacacaacactggccagacttgaacatactcccttgcccgccattgccattgaccgagatgggcaattttttattttggctaaactggataaagaacaggctctgattcaggacccacgttcggcgcgccccgaagttatcagcttcgagcagcttgagcagcgttggacagggcaattggtgcttgtgcgttccagtaacggtctgcccggagagacttctcgttttgacttcacttggtttatcccggctatcgtcaaataccgcaagttgttgggtgaagttttgctggggtcttttgccttgcagttgtttgccctggtgactccgttgttctttcaggtggtcatggacaaagtactggtgcaccacggcctaaccacactggatgtggtcgcggcgggattgctgggcatcatgctgttcgagtcggccctgagcggtctgcgtagctacgtgtttgcccacacgaccagccgtattgatgtgcagttgggatcgaatctgtttcggcacttgattaatctgccgctggcttacttccaggcccggagagtcggtgattctgtggctcgtgtacgtgaactggaaaatatccgtagcttccttaccggcaacgccattaccctgatgctcgacgtgcttttttctctggtgttcatccttgtgatgttctattacagcggctggttgactctcattgtggtgttatcattgccgctttatgcactcgtctcggggttggttacacctctcttgcgtaagcgattacaggatagcttcacccgcaacgctgagaatcaggcattccttgtcgaaacggtcaatggcattgataccctaaagtcaatggcggttgaaccgcaggccatccgcaagtgggacaaccaactggcggcttatgttgccgccggtttcaaaacacagaccttatccactatcgccaatgaaagtgtttcgcttatcggcaagttagtgacggttgccacactctggctaggtgcccgcctcgtgatagacgggcagctatcggtgggggaactgatcgcattcaatatgctggccggccgtgtcagcggccctatcatgcgtttggcgcaactgtggaccagcttccagcagaccggagtctcagtgcagcgcctgggagatatcctcaattcccgtacggaattgtctcaggctacacgtagcacagtaccgccgctcaaggggcaggtagagttcgaacaggtgcattttcgttatcgggctgatggttctgaggtgctgcgcggcgtcaatctggtcattggcgcgggagaaatcattggtgtggtgggccgctccggttccggcaaaagcactctgacccgcttgttgcagcggctctatgttccggagcgcggacgggtcatggtcgatggcatggacttggcattggctgatgtgtcctcgctgcgccggcagatcggcgtggtgttgcaggacaatatgctattcaaccgcagcattcgcgaaaacattgccttgagcgatccgggtgcgccgctcgaagtggtcatgcacgccgcccgcatggctggagctcatgaattcatccttgaactgcccgaaggttacgacaccattgtgggagaacacggcgcgtcactttcaggcggtcaacggcaacgggtagccattgcccgcgccttgatcggcaatcctcgcattttgattttcgacgaagcgaccagtgcgctggactacgagtctgagcgggtggttcagcagaacatgcaaagcatttgcaaggggcgcacggtcatcattatcgctcatcggttgtccgctgtacgcgacgcgcaccgtatccttgtaatggatcgcgggcagatcgttgaacagggcgcccacgccgagttactggcacgtcaggacggccactattcacgactgcatcgaatgcagcagggatgacaggcctccatttctggaaagtacgatcaaaacggctaatcacgcaatcaatggttaataacataatcaatggttaataacaccatcagaggcagatgtgaccaagataaacatactccgattcaaggaaaataatttcaaatgagcgctaccctttccttattgcagcgttatcgtcacgcgtggcgtgagtcttggcaccaacgtaaaaacatggacgtgtcgccgcgactggctcatgaattacagtttttaccgacggctttggagttgcaggaaacaccggttcacccagcaccgagaattttcacctggaccattctgggttttgctgtattggcgttgctctgggcctacatcggcaaaatcgaggtagtggctatcgccccgggaaaggtcgttcccaatggcaagaccaagttgattcaatccagtgaaacggcggtggtcagagcgatccacgtcaatgacggccagtcggtgaaagttggcgagttgttggttgagctcgacccgacggcggcgagcgccgatgtcagccggatccagagcgagctgctggctgctcgtatcgacagtgcgcggagtgccgccatgctcgacgcgatcaatcaacaaaagtcgccggcgtcgctggtaggaacgattgacaacgccaaccctgagcaggtactcagtgcccaacgctggcttcaaggacaatatcaggaataccgcagcaacctggagttggtggatgcagaaatcctccaacgcagcgccgaaatccagtcagcccaggcccaggtggctagtctgcgaaaaacgctgccgattgcgacacgattggccgaggattaccaacggttattgaagaaacagtatgtgtcgcggcatgaatatctggaaaaagagcagacgcgactggatctgcaacgtcagttaagcgtacagcaggccagtgtcttgcagcacgccgccgctcaggacgaggcgcgacgtcggcgtgaggctgttgttgcgcaaaatcgccgcgccatgctcgacctgcaacaggaagccaacaaaaaggtagcgaccctggttcaggagctggcgaaggcccgttatcaggaaactttgaccagcctcaaagccccggtggccggcacagttcaacaactcgctatccatactgtcggtggtgtggtgacacctgctcagccgctgatggtcatcgtccccgcagaccaatcggtagaagtggaggctaggctggaaaacaaggatgtgggttttgtccatgttggtcaaccggtcaccgtcaaagtggaaacttttacttttaccaagtacggcaccgttgacggcgaagtgctcaacgtgtcgaacgacgccatcgaggacgaaaagcatgggctcatctatagcagccgcattcgtttgaagtctgatcacgtgatggtcaatggtcagcgagtcccactgtctccgggcatgtcgatcacggcagaaataaaaactgatcaacgtcgcgtgatcgattacttcttgagcccattgcagcaacatatagatgaaagtctgagagaacggtaggttgtgagggcagctctgtgaactcggctcgccatactcaccgttttccgggtttgagataaatgaccgttaatgtttttcgccgccttactttatttggagtgatgaaatgaaagtattacgtatacatgaaaggtttaaaaactggcgcaatatgattattttcatgagctgtacattattaatggcctgctctaagttcattgatatatacaaaccgattgacgtatcgaagtctggtcaatcagtcaaaattgattttgaaattagcaaggaaggcaattatcagtttgtcctgctgtttgaaactggggagggtcatgatgaaatggcaaggcggtttaagttgtttgggagagctgataaagatggagtaataatccctgtttcactctatatcgttaaagatggcaagattttttttgataagaaaataaacgcttcagggtccgaaggagggcgtgtcttcaattacgaagagagaagtataaatacggctgtgagagaaattaaaacattttcattacctcccggacgctactctgcggtaattaccaccctggaggatgtccctgcttttaatggtattgagagttttgttgaattcaaccattacgatccgaagatttgaaatggtatcagtataaacaaagaagatataaaaatttggagtgacgtgatgaaaatattacaggtaaacgagagattcaaaaactggcgcaacattattatttttatgagctgcgccttattaatggcctgctctaagttcattgatatatacagaccaattgacgtatcgaagtctggtcaatcagtcaaaattgattttgaaatcagcaaggaaggcaattatcagtttgtcctgctgtttgctactacggatgattacgatgaaatggcaaggaggtttgagttgtttgggagagtttataaaaacggagtaataacccccgtttcactccatatcgttaaagatggcaagattttttttgacaagaaaataaacgctgcgggatccgaaggagggcgtgccgtcaattacgaagagagaaggataaatacggctgtgcgagaaattaaaacattttcattacctcccggacgctactctgcggtaattaccaccctggaggatgtccctgtttttaatagtattgagagttttgttgaattcaatcattacgatccgaagatttaagaagatttaaaatggtatcagtataaacaaaggaaatatcaaaatttggagtgatgaaatgaaaatattacgtatatatgaaaggtttaaaaattggcgaaatattattatttttatgagctgtacattattaatggcctgctctaagcccattgatatatacaaaccgattgacgtatcgaagtctggtcaatcagtcaaaattgattttgaaatcagcaagactggaaattatcagtttgtcctgctgtttgctacaggggatgatcatgatgaaatggaaaggcgatttaagttgttcgggagtatttatgatgacggagtaacaatccctgtttcactttatctggttagaaatgataaggttttttttgatgaaaaaataaactcagggggatacgacggggggcagtctttctattacgaagagagaagggtaaatacggctgtgcgagaaattaagacattttcgttatcccccggacgttactctgcggtcattaccactctggaggatgtccctgcttttaatggcattgagagttttgtcgagttcgcctattacaatccgaaaatttaagaagatttaaaatggtatcagtataaacaaaggaaatataaaaatttggagtgaagaaatgaaattgttacgtatatatgaaaggtttaaaaattggcgaaatattattatttttatgagttgtatctggttagtagcatgctctaattacattgatgctatacgcaagccgattgatgtgtcgcattcgggacaatcggttgagattaattttgaactcagcaagcgcaaggctggaaattatcaatttgctctgctgtttgctactgggggtgattataatgaaatagacaggcgatctaagatatttgggagtgttgataaggatgggattgctattcccgtttctcttcgtctggttaaagacggaaaggttttttttgacaagaaggtaaatgcggtaaggctcgatgggtggcaagccttctattacgaaaagagattaataaatacgactgtgcgcgatattaaaacacttgaattgctccccggacgttactctgcggtcattaccactctggaggatgttcctgcctttaatgacatcgagagttttgtcgagttcgcctattacaatccgaaaatttaagaagatttaaaatggtatcagtataaacaaaggaaatatcaaaatttggagtgacgaaatgaaagtattacaggtatacgaaaggtttaaaaattggcaaaacattattatttttatgagttgcactttattaatagcatgttctgagcccattaatatatacagaccgattgaggtgtcgcattctgatcagtcagtcaagattgattttgaaatcagcaagaagggagattatcagtttgccctgctgtttgctactgggcgtggttttggtgaaatgcaaaggagggataagttgttcggaagtattgataaggacggggttgccatccccgtttcacttcgtgtggttaaagacggtaaggttttttttgacgagaaaataaacgctgtgggaagtggttgggggcgtaccttctattacgaagagagaagggtaaatacgactgtgcgagaaattaaaacactttcgttaccctccgggcattactctgcggtcattaccactctggaggatgtcccagcctttaatgacattcagagttttgtacaactcatatattttaatccgaagatttgaaatgatatcagtataaacaaaggaaatataaaaatttggagtgaagaaatgaaattattacgtatatataaaaggtttaaaaattggcgaaatattattgtttttatgagttgcaccttattaatggcatgctctaagttcattgatatatacagaccaattgacgtatcgaagtctggtcaatcagtcaaaattgattttgaactcagcaaggaaggtaattatcagtttgccttactgtttgaaactggggagggttatgatgaaatggaaaggcggtttaagttgtttgggagagctgataaagatggagtaataatccctgtttcactctatatcgttaaagatggcaagattttttttgataagaaaataaacgcttcagggtccgaaggagggcgtgtcttcaattacgaagagagaagtataaatacggctgtgagagaaattaaaacatttttattacctcccggacgctactctgcggtaattaccaccctggaggatgtccctgtttttaatgatattgagagttttgttgaattcacctattacgatccaaagatttgaaatggtatcagtataaacaaaggaaatatcaaaatttggagtgaagaaatgaaagtattacaggtacacgaaagattcaaaaactggcgcaacattattatttttatgagctgtgccttattaatggcctgctctaagcccattgatatatacaaaccgattgacgtatcgaagtctggtcagtcagtcaaaattgattttgaaatcagcaagaaaggaaattatcagtttgccttgctgtttgataaaggggatgactatgaggaaatgaaaaagcgacttgaattgttcgggaatgttgataaggacggggtaataatccccgtttcgcttcatttagttaaagatagcaagattttttttgacaagaaaataaatgcaggaggacgtggttggggacagtctcttgattacgaaggaagaagaataaatatggctgtgcgaaacattaaaatacttgagttaccccctggacgttactctgcggtaattaccatcctggaggatgtccctgtttttaatgacatcgagagttttgtcgaattctcctattttaatccaaaaatttgacttattcagaaaaaaacaaagagaaataatcagtagaggaaataataagtatggaaaagaaatatactgtaacctataaagttgctccgatgggggctaagtatgtttatcaggaagataagaacgaacataaagcgggagacgtacactcttcagccggcggtcatatgtggtatgttttgaatgacgggagcggaagtgaaataagttacggttttgagtcaaggtatgatgaaccgtggggagaggggcgagtaacgaataatgataatgccgcctatcaacagacctcttacgaaaccaccgtagaattgactgaatttcagtacaacaggttaaaagctttttcagaaggcccatcgttagttggatttgatgctaagcattacaacgtggctaaaaacagttgcgtggatttcgtatttgcatcattaaaagccgttggctataacgaaaaaggtttcgagggagaactgttccctaatcataatcctatgcatttgcgtgatatgttgcaaaataatggaagtcgaattatccgtgacaacttgagtcgttatattcgttatagtgacttttattatctggacgatgaaagtggtcgagcgtgtttatggcttaggccagaggatacgaaaatcactctaccgatgaagccattgattaacatcgatatcgtgtccacgccaaaacctctgcggcatattcagggcgaaaacaaagctcagcaggatgttgctaacgggtttatacaaaattctgcaacacataaaatatctgccgtcggggatatgctcaataaaacagactttgcctccacccagatggcaggtcttgccaccggtggcattcgtcccggtgaaatgcagctcgaccccaatgtcaagcccaacagctatctgtcggagttctacaagcctttctaccaacccggagacactagcaagctggacttcggcctgcgcaacgctgtgacgttgaacggtttatcggcgatgacaacgtttaacacttatgttgacccgctgttattggatctgagcggcaatggtgtgcacatgactgacattcgtgacggcgtgttgttcgacatggataacagtggcacgcttaagcgcagcggctgggcggatcgcaataccgggatattggtgatcgacgatggtagcggtcagataaaaaatgccggccagatgttctccgaatactacggtggtaaggccggaataaacggtgccgcgggcgaaaaaaaattcaaggagggtttcggtgccttagccagtgaagatgccaacaaagacggcgtgattgatgaacgtgatccgatctggagtaaattacgggtctgggttgatggcacccacgatgcaaaagtcgatgcgggcgaactcaaaacactggcggaatggggtattactcagataaacgtccgggcttcgaacaaaacagacgtccgtgatgggaataaggtcgttgccagtgggtcgtttactatcaatggtaaaactcaggaagtgctggccgtcgactttcttggtgaccccgtcagtaataccttgagtactcagggagctggcacacgagtgacctccactcacaacgatatcataaccacggcttacgccagccagagtgaaacagatgaaaccttaaatgcggagcaactgggagtcagcaatctgtatggtggcagcggcaatgatacgttgattgcggcaaaaaccggcagctggctggttggaggcgcagggagcaatacctatgtcggtggtgccggcgatgacgtgtttgtcatcagcgcttctgacgatacgaaaaacattcacggcaatggcgggcacgatacggcgatcattgtcggtaaccaaggcgtggagctgaacatgggtcaagccagtttaaccatcgccgaaggcggaagcggcaacgatactatcataagcggtagtgtcaacggtgtctttatcaagggcggttccggcaattcgactctgataggtggcatgggtaacgacgtcctggtcggcggcagtgggcacaacaccatcgttggtggcacgggtaagtcggttatctatgccggtcctcagggcgacacaatttacgcctccaaagacggcagcatcattcacgctggcggcggcgatgataagattttcggtggtgtgggtgacgatgtgatcgaagtgggtcacggcaatgctacgattgatggggacggaggggtcaacatcgtcagcctgcacggtaaccacggcgattatcaaattacccgtaccgacagtgggtatgtggtggccgataaggtcgccgggcgtgacggcacggttacgctgaaaaatatccaaaaactcaatttttcagatatttcggcggttgatttacaaacacccaatgcgatgcctgtcgaggatgtcctcactcacgacaaggacggcaaggtttttgatcgtactcagcctcatctgattgccgcagaaagtctgctggctaacgatcaacaccttaacagtcagggtaccctgcgcattgccaatgttggggatgcgataggcggtacggtcagcctcacagctcagggcgatgtcttgtttacgccggatgcagattacaccggtgtcattagctttaaatatggggtaactgacgcagccgggaatccgtcagcatcggtagtcgatctcagcagtggggaaaccgcgccgatgcgcgccgttgcgacattattgaccccggaagtcccgctcgatccattagctgctcaacaatggtatttgagcgatgccaacattctgccggtctggaaggactacaccggcaagggcgtacgcattggtcagttcgagccgggcggtaagtttgccaccgcgcctgaaatatttgatatcaatcaccccgaccttgcggcgaatgtcgacaaagcttggttgcagactcaacaaaccaatggcaccttgccgaacgtggtctccaaccacgcgacaatggtggcgggtgtgatggtcgcggcgaagaataatacgggtggcgtcggggttgcccatgatgcgacgttgggcggctattatctggccaatgacggtgccgatcttgcgggactggggcatatggtcagttttgatattgccaacaatagctggggatttgccaacgatttcgcgctcagcagctttcagggcggctccatcaatactgccgcgtcgctgagcctgaatgcgcagtatgcggcggctaatggtcgtggcggattgggtaccgtcatcgtggcggcgggcggcaaccatcgtgcagaaggcggcaatgctcaggggtcgctgaccaataacaaccgcttttcggtggaagtcggtgcaatcaacgcacagggcgatttgtcgacgttgcagattggctcctcacccttctccaatccgggagccagcctgttggtttcggcaccgggcagcaatgtcgtgtctaccagctatatgctgaaaaccgaacgtggctcaactttcggcaatgactacaccagcatgcaaggcaccagctttgccgctccgatagtctccggtgttgttgcgttgatgcttgaggccaacccgaacttaggctatcgggatgtgcagcagatccttgctctgtccgctcgcaagatcaatgacccctctaccgcatggagcgataatagtagccatagctggaatggcggtggcatgcatgccagcaacgattacggttttggtcaaatcgatgcgcgagccgctgttcgcctggctgagtcttggatgactcaaagcaccgctgccaacgagttcgtctatagcgcatccagcggccctctggggaaaaccttggcagcaggtgaaacgctgacgtcgtccatcgccatgaatgccggtctgaatgtcgagcatgtcgagatcgattttgacgcccaggcaggccgtcttggtgatctgacgctcaaactgatctctcccgatggcactcagagcatcttgctcaatcgtcagggtaaggttccagacggcatgccgggcgcgagtgcgaccgatctgggtagtagccagtcggggacgttcaaatacagctttatgtcgactcatgatttgggtgaacgctcggctggcaactggaccctacaggtgagcgatgcgcattccggcctgccggtcacattaaatgcctggtcgctacgtttgtacggcagcaagagcacctcggatgacacttacttttacaccgacgaatatatccaatcggtggtcgggcaggccaaccgcgcagtgttggatgatgcggtcaatggcgtggcgggagggcgtaataccctcaatgcggcggctgtttcgcgggatacctcggtcaacttgctgaccggtgttgccagcattggcggcacagcgttgacaataaagaatccgtcgggcattcagaacatcgtcaccggtgatggcaacgatacgctggtcgcgggtaatgccgatgcattgcttgatggcgggcgtggaaacaacacactggcaggtggtgcgggcaaggacttctttgtggtccaccaccgtgaggcaggcagcgatgttatcagcaacttcgaggcggctcgtggcgaaatcatcgatctggtcggatttcgtggaaaaacgtttgccgatctgttgctgacgcagcagggggcggatgttaaggtcgatctgggtaaggggcagagcattgtcctgaaaaatcagccactcgccgggatcggtgcggcgaacttcaagttccaggatacttttatcgccccggtggcttacacgaatagcgacgccgcaacgctccagccacaagaaggcttgggaaccgtgatccttaagggcggcggcaagggcgtcatgctcaccagcgatgctcaggggcagatgaaatttagcttgaatgggacgatctatagtcatgacagtgcggcgtcagacgtttttgtggtggccgcccaaccgggtgccagggactacaagaatgcattacgtgggttccgtcacggcattgataaaattgatttgcgtcaagccggcgtcactgatttcagccaactcacaattgctaagagtcatcgtggcacgatcaacggtctgtcacaaattcatggcgttgaggtggtctttaatggggtcagcggtactgattcaaacgtgaagttgctgtatctcgatactctggatacttcgcaggtcgatgcggccgacttcctttttgcggagcttacaccagatttggtcccaacggtcaagccagtggtgacgcaatctcttgataaaccgacggtgactgtaccgggttcattgacaccaattgtcgacccccttggcgttgataagcctttaccactttcccctatcgacttgaagccgattagtattcccccaaggaagccggttagcattccccttattgactggagtctgactaaaatttcttctattgatattgaccgggatatgattaaagttacccctgttgagctgaatccgaccagaattaacactggccttgtcgacctgaggtcgcgttttgaccagaatgttgaccggatgtcactgattgaccggaagccgattagcactcctcctgttgagccgcgcacaacacttaacgttccgaaaattgagccagcagtggaatctacaccggtgaccactgaccctgattccattacggtcaaaaatcccttttccgaggttacgttgggggacgagagcaagactatcaatgtgaaagctatggatagcaaaatagttgccggtaacggtgacaataaggttaatgtgatggaccgctttgccgatatcacgttaggtaatggtaaaaacgtcattgttggcaatatcgacaaactaacagttggacatggcaacaacaccattaaagcgtcgggaaccttcacgaaagtaaacgtcggggatggcaataaccatatcgtgacccgcggtgagatgtcgacggtagaagtcgggaatggtgataaccatatcatgaccagcggtattatgtcgaaagtaaaagtcggggagggtaataaccatattgtgaccagtggtactatgtcgacggtagaagtcgggcatggggacaacgatttggaatttagtggtgatatggggaacttggtgtttggaaaggacatcagccctgagcgtctgtggttccagcatgaagggcaggatctgcaaatttcggtcattggcagcaagcaggaggtaacgctgcataattggtatgccaattccaccgaacgaccacgtaacatcatggccggtgatggtcatcggttgatggaaagtgatgtcgaaaatcttgtccaggcgatggctgccttcgcgccgccgacacctgcgaccacaatgctcggcgatgtcgagcaacagcggctgcaacctgtgctggcagccaactggcactgatcggtaacaaggcccgcgatggttatcgcgggccttataaataggtgaattgcgccgtttaaatgtaagcgccccatatggggacttctgcctttcgacaggcaaaatgtctaactgttggggcgcgtttcacaatttaatatgaatggaaaatacaaaataaccatttatttaatcgccaagtatgtcagtcagtgtggaattaaaaacagattaacggtgttgcgcttattatgtgaatccaggctgtggttccaaattcagcataagaattttagaacggcgctgatagttatataacacttgtttctgaatcggtagcattgagagttctgcgggctcaaaacctcgctcttggaaccaatgaatgctgcgggtagtcagaacaaacagtttttccagtccgagctgtttggcgtgttccgcaatgcgattcagtaatacttcacctcttaaagagctgcggtatttaggattcaccgctaaacaagccatttcgccaattttctcttcaggataagggtagagcgcggcacaggcgatagttaggttatcgcgttcgataatgatgaatttatcaatttctctctcaagttgttctcttgaacggcgaaccagaataccctgttgttccagtgggcgaataagttcgagaataccaccaatatcattgatattagctcggcgtatttgttccgcactttccatcactatttgagtgccaataccatctcgggagaataattcttgaagtagagaaccatctgcctgataacttaataaatggctgcgacgaacgccacgacggcaagcttttattgcactccgcaaaaaacagactgtgcctgaatagtagtcacctttaacttctagctctttaatcagttccggtgcttgattaagaaaaacttccgatagaatttttccgtctttgtcttgtacaccttgagtagaacagaatccaatcagtttttcagcctgtagtttgatagctaattgagtagcaacatcttcaaatgccagattaaaactctctccggtgacagaaactgcgacagggccaattagcacgattgcgccattgtctaattgacgatttatggcatgctcatcgatacggcgaatttttccgctgtggcaataatccacaccatcatcaacgccaagaggttgagcaataatgaagttaccactgacaacattaatgttggcaccttgtaacggggtattattcaaattcatagaaaggcgtgcagtgatatccagttgcagcaagccagcagattgtttgactaattctaatgttttattatcggtaacacgggtgtgtttgtggtaaaccggttcgtaatgatggtctgcaaggttttgctcaatttgaggtctggcaccataaacgacgaccaggcggatgcctaaactatgcagtaatcctatatcgttgataatattggtaaaattttcgtgagcaatagcctctccaccaagcatgataacaaaagttttaccacggtgtgcattgatgtacggaacagaatgacgaaatccttcaactaactcggtgcttcgttctttcataataggctctcgattgaatttttattcgtaatttatgcttttttattccttttgagagaaaatggcaagaggcaattcaggtaaaaacattttgatatacctgtagacgttaataatttgcaaaatataaaatgcttttcattgacgacagcataatgctgattggttagcgtttttcacttgatcgtttcgtttggtgaatatcaccctgaatgtttatattttatgaatggaatattagtagatgagtcattcagatcataatctgtcacgacgtcgtttgttgcagggagccgcagcgatgtggttgcttagcgttagccaggtgggttacgcagcgtcagcaaaaattatcgcagtacgtatttggccggcctctagttatacccgtgtgacgcttgagtccaatattccactcaaatatcgccagtttgtgctaaaaaatccaaatagaattgtggttgatcttgaaggtatacaactgaatcatactctaagtgggatgggggagcagattcaatctcgtgatccttatcttaaactggtgagggtagggcagtttaatcctaaaacggttcgtttggtgtttgaagttaagcaatcggtcagcccacatatgtttactttgaaaccggtggcgaaatttaaacatcgtctggtgttggatatttatccggcagagagggttaatacggatgatgatccattgcttgccctacttgaagagtataataaaggtcatttagcagaagatctgccagtagaaaaaccaaagtcgggcaaagcaggtaaagacaggccaattgttatcatgctcgatcctggacatggtggtgaagatcctggtgctattggcaaatataaaactcgtgaaaaagatattgttttgcaaattgctcgtcgattgaaaacgctcattcagcgtgaaccgggtatgaaagtctatatgacccgtaatgaagatgtgtttatcccgctcaaagtccgggtggcaaaagcgcgtaagatgcgggctgatctcttcgtttctattcatgctgatgctgttactaaccgagttgcccgtggctcttcggtttttgcactctcgactaaaggtgcaaccagtaataccgcacgttttctagcccagacgcaaaacgaagctgaccaaattggcggagtgagtaaaagcggtgataagtatctggatcatacgatgtttgatttgttacaaactgcgacaatcaatgacagccttaaatttggtagcgaagtgcttaagcgtatgggcaaagtgaataaattacataaaaatcgggtggatcaagctggatttgcggtactgaaagcaccagatatcccttcgattctggtagagactgcgtttattagcaatttggaagaggagcggaaactgaaaaccgcacgtttccagcagcaaatcgcagagtcaatttttgcgggtatcaaagcttatttcaagaatgggggtaatttggcaatttgagcttgccgctatgggtaatttttgctgttaaacagggaaggaggctattttcctttagcctatactccctgccctatttagtgggtagtgataggttgaactgccaggcgcaagcccatgacacgcagaatcgtgcttagacttctaacttccgggttgccctcggctgacaaggtgcgatagagctggttcggattcaactcagcttccttggtcacgttacgaactccaccgaaagtgttctcctatctgtttctactcttccattcacgccagtattcacacgctctgggttttgcttacgtttgtcgccgccgcagagcagaagaactacagttaagccagatttggcgtaatagacccgataccctggccctatgtcaatgcgcagttcccagacaccctcggacaagggtttgtgatcagttccatgcgcataatgcgtcggtcaatggcaatttgagccttggtgtcacgtactatgttctcgccattcttcaaagacatcacgtccgttgttgtcgatatagtgtcgtatctcattcatggctttgttatcgtttataaacgataacaaagccagaaatgactatatgtggatatttatcattaaaccgagagcagatacgatgacgaaaaaattatctaaaagtcattatgaagttgcttttggagtttgtatgctgaaatgcatagagaattggttgcgggggccggatttgaaccgacgaccttcgggttatgagcccgacgagctaccaagctgctccaccccgcgtccgttttgatattttgattagcgaaaattggttgcgggagccggatttgaaccgacgaccttcgggttatgagcccgacgagctaccaagctgctccatcccgcgtccgtttagaacctactttgtattttcctgcatcactaacgcctgctggaatcggttccattcgcaaatattgaactactttatagtgttggttgcgggagccggatttgaaccgacgaccttcgggttatgagcccgacgagctaccaggctgctccatcccgcgtccgatgcgggcactatactcaggataagatctgttgcaagtttttttattaattattgtttgtttcgttacgtttttgattagttactctgcgtatcgatgtttttctattcgtttgtgtcgttgttttgttaagttattttttttatggtaagtttcatcgtttctattggtttagtattttgttcgccacagagttatgttggtaagagagaaaacaacaatgaaatactggggtaagtatctgttgtgtggaaccgtgatttcactgttggttggatgtcattctcgcccaacagcacagggccaacaatatagagatggtcatattgctcaggatttacggttggttaatcaacctaatgcgcagggtaagccagttaatgcaaaggatttttcagagcaggttgcgctgattagtcagtctgctcctcgtctgtataatcgtaatagtttaacttttgacgctgttcaaaactggatgctagcgggtggtgaaaccagtaagttgcatctgtttaatttacgcgcttaccagatggaaggtgtggataattacggtaatgtccaatttaccggctactatacgccagtgttacaagctcgtcgtgttaaacagggagaatttaaatatcctctgtaccggatgccgcctaagagtaaataccgtttaccaagccgaactgaaatagacaatggcgcccttagccccagtctgattattggttatagtcgttcactgattgataattatattatggaggtacaagggagtggctatgtcgattttggtgatggtgggccactgactcttttgggttatgccggtaagaatggccatatttaccggagcattggcaagttgctgattgagcgcggagaaattgcgcaggaagatatctccatactggcgattcgtaaatggacagaatctcacagtgaggcagaagtccgtgaactgttggagcagaacccatcatttgttttctttaaacctgaaaactatgcaccggtacgtggtgcgagtagtgttcctttaattgcaaaagcttctgtggctgctgataaaatgcttattccaccaggaacaaccctgttagcagagatacctctgttggatagagagggtaagtttaccggtcagtaccagatgcggctggtggttgcattggatgttggtggggcgataaagggacatcatttcgatatctatcatggtattggtggggaggcaggtatagcggcaggtttctataaccactacggtcgggtttgggtgttaaaaaaagcgcagcctaccatgttgatggtaagtcagtgattgctcttcataaattttataacaggttttcaggattgatattcagtaatgcaaacttctctttctgatgcatatatgcagcgctttgccgggactgcccgtttatatggacaaaaagcgctttctttgttttgccattctcatgtttgtgttgtgggtatcggtggtgttggctcttgggcggctgaggctctggctcgtacaggaatcggtgcgatcactctgattgatatggatgatgtttgtatcaccaatactaatcgccaattacatgctttaaaacagcatattgggcaaccaaaaactgaagtgattgccgagcgtattctggcaattaatccagagtgcaaagtgacttgtgttgatgattttctcacacccgataatgttgaagagatgatggcggctggattcagttatgtgattgatgctatcgatagtgtcaggccgaaagctgcgctgttggcttattgccgtcgccataaaattccgctggtgacaaccggtggagcaggagggcaacttgatcctacacagattcaggttgttgatttggcaaaaacggttcaggaccctttagcggctaaactgcgcgaaaggctgaaatctgattatcgtgttgtgaagaatggcaaaggtaaattaggcattgattgtgtgttttcaaccgagcaattagtttatccgcagagtgatggttctgtttgcgccgcgaaaagtaccgcagagggaactaagcgtatggattgcgcttctggttttggtgccgcaacgatggtcacggcgacatttggatttgttgcggtttcccatgctctgaaaaaaatgatagctaaagcgcaacgtcagggtgatctttaatcttacatataagatcttgcggcgttttgcacggtattaatcagcgacttgacgccgtttagccgtgagccgcttatctgttgttccagcccaagttgttggaacagcgccaatagattggttgttaaaacttgttccggtgtcttgccttctacggccgttaagatcactgccagcaggccttttacaatgcggccttcgctgtcaccataaaaatgtaaatagccatctggcagtaattgatgccctaaccaaacccggttttcacagccggacatttcagtgtcttgctgtttcaagttctctggtaatgcgggcagtttctttgccagtaagattaactggcgataacgatcttcccattggcggcattggtcaaaggttgcaatgagctgttgttggctgatttcccggccaaatgggtgtggtgcaatccggttttcagtggcttgagtcataatgtcattcgtcctgtaattcattcatcctgtaatagagaaaggccaaattttactgcctgaattaaagcatcggcatcttgttggttgttgtaaggcataaaggaggcgcgcaaacagccgctgatacctaacgcttcgatcaagggttgagcgcaatgctgaccggaacgtaacgcaatattttgttctgccagaatggcggccaaatcactgtgatgaatgtcggtaaaattaaaagccaataagctggaaccggcaatgcgatagctgataaatccgggtaaagcggagagttgttcttcggtataatcagccagtgtgactgcatgggtttcggctttggtaatatcaatatcttttaaccattccagcgtggcagaaaaaccaataatacctgcaacattcggtgtgcccgcttcaaatcggaaaggtaccgcttcgggtataaaaccgctgaatgacgtgtgggagagcatttttccgcccccttgccagggaggcatagcattaagaagctcacttttgccgtaaagtataccaacgccgttcgaactatagagtttatgagcagagaatgcgtagaaatcgatatctgattgttggacatcaatgggattgtgaacaacgccttgtgcgccgtctacaacgaccagacagccatgttggtgtgctattgcagttattgcagcaagatcaactgctccgccagtcacattggacatttggctgatggctatcaagcgggtgtgtttgtttagcagttcaggcaacatgtggatatcaggcaatttgccattgcctaaaggccatttaataaccttggcaccgatttgctctgccaacattaaccacggtatcagattggaatggtgttcctgctcactaacgataatttcatcatcgggctggagatgagggcggaaataactttgaaccactagattgagggattctgttgttccttttgtccagataatattttcagcttgtggagcgttgatgaattcagcaacttgttgccgggcttgttcatagcgggaggtgatttccagcgctgcgtggtgttggctacgatgtacggtagcgctactgtttcgataataatcttgagttgcctttatcatggcttgtggtttgagagcagtggctgcactatccagaaataccgtctgttgttgtgatggtaattgctgtgatggaaattgttgtgatggaaattgctgtagcgctggaaattgctggcggaactgttctggttcgaactttttcatagaagtattaattttgttttagtggtgatggtgcttaaccatttgtttctggctgaaaatggatgtatctgtcatctttcaagttgcctctttgttggctgcgctcactcaccccggtcacatcgttatctatgctcccggggattcgctcccttgccgctgcgatgcatcttgaaatccatagggtataggttattacatggaataatattgccatgttccacgccttatgccaaaaaaaagcaccgcaactgcggtgcattaaaaaatcactatggacagacagggtaaatgtacaggaagtgaaaaaacagtagcttgagctacagggtccggtttcccagacaacttgcaaacacaacatcacaaccacaaagccaaaagtttcatagcgttaagctgattcacttttcgttccggcttaggaagtggcgccactatagggatttactggtgtatcctcaatggacaatttataatgattcggattacaaaaactaataactaaatataaagagttaccggtatctccaacattacataagggctcacatgtccaaacgtttacctccacttaatgcgttgcgggtttttgatgccgcagcgcgccatttaagttttactaaggcggcagaagaattatttgtgacgcaggccgcagttagccatcagatgaaaagtctggaggattttcttgggttgaagttatttcgtcgccgcaatcgatcactattgttgactgaagaaggtcaaagctactatctggacattaaagagatattcacggcgataaatgaagcaacacgtaaacttcaagctagaagtgctaaaggtgctttgacggttagcctttcacctagctttgctatccagtggttggttccaaggctgtccagctttaatttagcttatcccggcattgatgtcaggatacaggcggtagatagagaagaagataagcttgctgatgatgttgatgttgccatattttatggtcgtggaaattggccggggttacgcactgatcgtctttacgcagaatatttgcttcccgtttgttctccttcgttactgactggagaaaattctttgaagacccccgcagatttggcgcgtcatacgttgttacacgattcttctcgtcgtgactggcaagcgtatgtgcgccagcttgatatgcagcagcagataaacgttcagcaaggaccgatatttagccatagtgcaatggtgatccaagccgctgttcatgggcaaggtattgcactggcaaataatgtcatggctcggactgaaattgatgcggggcgcttagtttgcccatttaatgatgtgttagtgagtaagaatgcattttaccttgtttgtcatgacaatcaggctgaattggggaaaattgctgcattcagacaatgggttttggcacaggcagccagtgagcaggaaaaattgggctttattaccaatgagtaagagcggaataaggtattcgagctgtaaaagctctcagatagaagaaaaaggaagataacagtgaatagtcgcctaatgcttatctttgctggcttaagtgggtttttctatgtggcgtttggtgctgtagggtcacatttattatctccgatgatggaaaaatatcagataagttggattgatcttggtctgcaatatcagggtattcacactctggcaatgatggcgatgtctgccatgctaatgcgtaaagttgtgctctggttttactggagtggcgttttttttgcagtaggtattttgttgtttagtggcagtctctattgtatggccttattgcaggttaaatttttcgcttatattacgccagttggaggatttagctttcttattggctggtttttagtattaattggcgctttgcgtctaaggaaatcggcgcttcgccatgaataaaattgctttatattgccgccctggttttgaaaaagagtgtgcagcagaaatcaccgataaggcgggccaaaaagagatttacggttttgcccgggtgaaagacaacagtggttatgtcctgtttgagtgttatcaatatgaagatgccgatcggctgattcgtgagatcccatttcgggagctgatttttgcccgccagatgctggtcgtgggtgaattattgcgagatttacctcctgaagatcggataagcccgattgtaggtatgttgcatggtgtcattgaacgtgcaggtgaattacgggttgaggtgcctgatactaatgaaagtaaagagttattaaaattctgtcgaaaatttactgttccgttgcgtaatgctatgcgtcaggaaaagatcttgctgattcgggaaaacgttaaccgcccggtgatacacgttttctttatcgctccgggttgctgttatgttggttattcttacagtaacaataattcgccattttatatgggtattcctcggttgaaatttccttcggatgcaccaagtcgttcaacattaaaactggaagaagcctttcatgtttttatcccacatgacgaatgggaagagcgattggctagcggtttgtatgcagttgatttaggtgcatgccctggtggttggacttaccaactggtgaaacggagtatgatggttcatgcggtagataatggcacgatgtcgaaaagtttgatggatacggggcaagttaaacatcacaaagttgatggttttaagtttgagccttcggcaaagaacatttattggctggtatgcgacatggtggaaaaaccagcaaaagtgacgcagttaatggtagattggttagttaatggctggtgccgggaagctatttttaatctcaaattacccatgaaaaagcgttatgaagaagttgctcataatttgcagaaaatgcacttgcaattaaaagaagggggtattaatgcacaaattcaggcaaaacacctttatcatgacagggaagaaataacggttcatgttcgtcgtatttggtctgcctatgcagctagccggaatgattactgattcacggttgttcatcattattctggaataactcataaaataagatttcttaaaacgcctcagtgatatcctgaggcgtttttttcagtattgaatgacattattgcattttatctcttataccgtgcggagtaaaatgggtgtattagaatgatttaattcattttttcagctaagaaagtattacataatactccatgtgtgaggtaattatgatctaatgtaacaatgaatattgtatgacttatgtggtaaaattgttgattttttaactttacttaaggtaaatataaaaaataaatatattattataagcgtttaattaaacgtgaaattaatgttaaataattaaatgaattaatattataaaatgaaaaataatgaaagagattattttttaattattttaattaatgttttaagtatagcatttaattttgctattaaatgtaaataatatttatttaatataaatttaaatcgctgttttatatttaatatgtttttgaattaatcagctatgttgataatattattttatattcaaaaaccaaaaatataattttattatattgggactgagtgctttataataaaggaaatattaactattctgtgatatatgttttttattgatttaatcaagtggttattaattttttaataatatataccctatggatttcaagatggatcgcgacggcaagggagcgaatccccgggagcatagagaactatgtgaccggggtgagtgtagccaacaaaggggcaacttgaaagataacgggtatattcatataacggcttgggataatctccgattaaaattatcaagaataatgttataagtgttttaaagtttacttcatatatagttaaataaatagataattaattcataataaaataccgctaagaaattagcggtatttttttcgtcttaaatggttatgttatataaaacaatcgcttatttgttttatgttatttttatcacgtttatattaaaaaaatatgttaattgctttttacataattaactttagtgttacgtttatgcgaaagggattttagttgttaatttgtatgaccaggggcggtctgttgttttcaggttttattgacttgtatttaattaaataaaaagaattttatatctaagtcctgattttatggagaaatatatgtctttaaagaagaaaatttcatactcggaagacgttagcggttcagaaaaagcaaatgagttgctgaaatggttacaggcttatataccaggtaaagactctaatattgtcgttgagcatgagcccagtaaagatgctgctaaagaattaatccggggtgattatcgttgggggcatcaggatgacgataaatctaaagctttccaattaaagtattctttcctggagagtaagccggataatatgccgtggcatatttctgaattttcagcatttaatgaagcacaaaaagctgctgcaaaactgtcaatacaatcttgggctgatgttgctaatattaatttcgttgaaaccactgacgccaaagaggcaaatgttacctttggattctttgatgttagcttgacggggagttatgcgtttgcttatctgccaacccccgagaagacacaggtaggaacttggtataacgcgaaaagccgtactttcttaaacaacgatattgacgtgaatggttatggccgtcagacgtttactcatgaaattggccacactctagggttgcaacatccggctgattataatgcgtctgacaaggtaagcccgacttataagaacagtgcgacttattttgaagatagccgtgcttataccgtcatgagttattttggtgagaaaaataccggtcaggactttaaaggtatttattcttccgcaccattacttaacgatatttctgccattcaggcggtatacggcgcgaataataccatccgtgctgatgacaccgtatatggttttaattccaacacagatcgtgacttctataccgcaaaagacgagaacagcaaactgttgttcaccgcttgggataccggggggaatgatacgtttgatttctctggatttactcaggatcaacgtatcaatctgaatgaagcgtctttctctgatgtcggtgggttgaaagggaacgtctctattgcccgtggcgtcacgattgaaaatgcaattggtggcagtggtaatgacgttttaatcgggaatgatgccgccaatactctgaaaggtggagcgggtgatgacatcatttacggcggcttgggagcggataatctttggggcggggagggcaacgatacctttgtctacctgagcgccaaggaatcaccgcctcttgagcgtgattggatccatgactttgtttccggtaaagacaagatcgatgtgtcactgttcgatctgggtgaagccgggaaggggggcgttaaatttgtaagggaattcacgggtgaagtcggagaagcggtgcttcgttataacacggttgataaggtgaatgatttcgccattaatttgggcggtgaattttcctacgatgatttttgggtgaagatagtcggagagccaatcttagagtctgatttcattctttcataacacaacaacacaaccgcatctgattttggatgcggttatttgtttggaggcggcgtggtttttgcggcttggtatctgaaatttgcaggctttgttgctcttatattcagcattatcggaggaagtatggcgagtagtcttgttctcccacacgccagtgaattgaaaggcgtgtggcaattgtcggataaacatcaacaatgcgatgtgttattgactgaccatcccttaccagagggatcaatttggtcacttaatggtgataacgattgtttagcgtatatgtttggcgaagtgcctgccggttggcgaccaacaccagatgggctcacaattactgatgaacaggggagtggtttggctttttttgctcatgaaccggatggttggtttgctcgttttgccgatggtcgggaattaatgataaagcccaataagacgagtaagaaaaatgaataaagcaggaaacattaacatcagatagttatatttttaaaaaataaaaataaggaaataatgtgaaattactactcccaaaggatgaaattactgatgtcattcgtgctcgtagtcgggtattttgggctatcgggttgttcactgcttttattaacctgctgatgttagttccatctgtttatatgttgcaggtttatgacagagtattgccgtcgggcaatgaaatcactttgctgatgttgacgctgattaccctcggcatgtttgccatgatgggcatgctggaatatatccgtagcatgattgttatccgtattggcagccagcttgatatgaagctgaataaccgggtttataccgcatcttatgaatcgaatctgaaaaatggcacgactgatgccggtcagatgctcaatgatttagccaatatccgccagtttttgacgggtaacgccttgtttgccttctttgatgccccttggtttccaatctatctgctggttatttttctttttaacccctggcttggtctgttgtcattgggcggtgcactggtattgattgccctggctgtgttgaatcaatggttatcaagtcagccgttatccgaagccagtaaactctctctacgttcagcaagtcttgccagcactaatttacgtaatgccgaagtcatagaggcgttagggatgttgccggtgctacgtcggagatggtttggattacatgagcgtttcctggatttccagcgcattgcgagtgagcgggcttcagtgattaattcagtcactaaaacagtgcgtttggccttgcagtcactgatcctgggattagggggctggttagcgattggtgggcatattacgccgggcatgatgattgcggcttcaattttgatgggacgtgcactttcaccgattgaacaattgatccaagcctggaaaggctggagtggtgctcgtttgtcatggcaacggttaacccacctgttggaacaacaaccggaacgcaaaccgggcatgtcattgcctgcgccaaaaggaaatttagccgtggataaagtttccgcagcgccgccgggaagaaacagtaaggttgttttgcaggatattagcttctcgttggatgccggtgatgtgatgggattaattggtcccagtgcgtctgggaaatcgacgcttgcccggttactggtcggaatatggccgacacaggaaggcgttgttcgtctggataatgccgatatttatcagtggaataaagatgaactgggctcctcaatcggttatttaccgcaagatattgagctatttggcggcactattgctgaaaatattgcccgttttaatgcagtagaacccgaaaaggtggttcaggcggcaaagaaagcgggtgttcatgagctgatattagcacttgataagggctatgacaccgtgattggtgctggcggagtgggattatctggtgggcagaaacagcgcattggccttgctcgtgcgctatatgacgagccgtcattggtggtgttggatgagcctaattccagcctggatgaggcaggggaaagagcattgaatgaggcgatttctcagttaaaggcacaaggaaagacagtgattgtgattactcaccgcacctcattgctatcacagacaaacaaaatattgctactggttcaggggaaaatgaagatgttcggttcatctcaacaggtgatggccgctttatcacaaaggaataatagtcaggaacattctgcaaccaaggcagtcgcccaggcatcataggtaaatgtgcatttaattataataatatcaaatagctgagacggagatttctgtccgggagtggatatgtctgatcagattacgccggtaagagaggaaaaaggattattgcctttggaagaaaggcattttttacgactaggatggttcgtgattggtgtggggatcctgggatttctcatttgggccgcgttagcaccgttagataaaggggtggcatcttcaggtgtggtggtggtggatggtaatcgtaaaacagttcaggccccggcaagcgggattatcagtcagattaaggttgttgaaggcgaaacagtaaaagcgggtcagacactcgtccagctcagtcaggtgcaggcaaaggcacaggttgatgcacttcaagatcaactgcataccacgctggcaacggaagcccgtttattagccgagcagcatggtgatgaagcgttaattttccccgacctattacagcaattacactctgaaccgcgggtgaatgagattattgaactgcaaaagcaactgtttgtatcacgccgtgaagtgctgagaagcgacttggcagggcttgagcagtctgtcgaaggaatagatttccaaattaaagggctgaaatcttcttttctcaataaacgcatgcagcaggcggcgcttaaagagcaaataactaatctgaaatctttagcggatgagggctattttccgcgtaatcgttatctggaactgctgcgtgaacaggctgagctcaacagcagcatagcggaaatggaaggacgagccggtcagcttgaaaaacaattacaggaaacacagcagcgtattattcagcgcaaagcagactatcagcgggaagtgcgcacacaattagccgaggtgcaggtctctgccagtgaatatagaaataagctggatacagcccagtttgaactgactcatacctcaattgttgcgccggttgatggcactgttgtgggattaaatatttttacccaagggggggttgttgctcccggcgaaaaactgatggaaattctgccggaccagagggcgtttgaagtggaaacgcgtgttgcggttaatttggcagataagattagtaaagggttgaatgtggatctgatgtttaccgcttttaaccagaatcggacgccaaaagttgaaggaaaagttgccgtgatttccgcagataggttggtcgatcccgcaaccagtcaaccttattatcagatgagagtggttgtctctcctgagggaatggaaaaactgaaagggttggatatcaggccaggaatgccggttgaggtttttgtcaagacgggttcccgctctctgttaagttatctgtttaagccattgctggatcgggcttcaacatcgttgatagaggagtaatgatgaaacggaataatgcttctttatcaatgggtttgctgattcttgtctgtgtcaatctgttctcttttcctgcatgggcattgagtttgactgaagtttatgcgctggcgttagaaaatgatccgatttttctcgccgccgtgaaagagcgggaaggcggtgaggaacatgaaaagatcggcagggcagacttgttgcctaaggtgataatgtcttaccagcagtcaccgaagaattggcaacatacggagtatcccaggtataacttgcggggcgggaagacaaccgaaagccaggatcgccaatatcgcagttatagcgcggctgttgtgttgactcagccgttgatcgattttgaaatatgggcgcgttataaagccagccaggctcacactttgatgagcaatgagcgttttcgggcagattttcagcaattggctgttcgggtcgtgaatgcttacgtagatgtggcttatgcacaggatcagattgatttagtcatacggcagaaaatggcttatgaaaaacaactggaactgaataagaagttgtttacttctggtgaagggacgctcactgatgtggtagaaacacaatcgcgttacagtcaggcgattgccgatgagatagcggccaaagatgatttggatgcagcaatccgaaatttacagctcattgtgggggtttctctcccggttgatttaccggtgcaacggttatcaaataaaaaacgattccagatattgaagttgttacctgaacgttatgaggcgtgggaagagttggcattagccaacaatccgcttctgtccgcttcgcgtcaggaagtgaaagccgcgtaccatgaagtgcaacgtaatcgggcgggctatttacctaggctggagttgtacgcttcccactctgaaaacgaatccagcagcgataataccatagatcaaaaatatcgcaccgataccattggcttgcggatgagcatgaatatctataatggtggtgctacgtctgccgctgtacgtcaggcggcggcccactatggcaggactaaatatgatcttgatgctcaggcgggagaaatccttaatgcattacgccgcaattataatcagtacttaaatagtgaaaaaagaattagtgcttatgaaatggcggttgaatcagctagcttacaggtagacgcaaccagtaaaagcgttgcgcttgggcagcgggttaatgtggatgtcttgaatgctgaacagcagttatatactgcccgacgtgatctctcacaagcaaaatataattatattaaggcttggatcggcctgcttagtgaggccggagaattaaaaggcgaacatctggataaggtagcgaagtattttcgttaggttgctattgtcagccggagttgttgcaaattaccctttaaagccagatcggtacgtaatgacgcaacttcccggctgataaacgcgatttcttgattggattctagtttattgcgccatttctcgggttgttggtcgaggtgttggaacagattatccagtgtaccggcctgttgcagtaaagtggcagcggttttcgggccgatcccctggatccccggaattttactgctactgatccccgccagcccccaataatcaggcaattgttccggtaaaaccccaaattcttgttgaacaaagggcatatccaaccagcgtttctggaagtaatcacggatacggatattgggtgaaagtaattggcaatagcctttatcagtagaaacaatcgttacgttgtgaccggccgcagtgacttttactgccagtgttgctgccagatcatcagcttcatgccctttggcatgccagcaagtgactccttgttgctcaaacgacgctctgatttgcggcatttcttgttgcagattgtcaggcatgggtgaacgaccagctttgtagtcaggtaatatctggtgacgccaactgtgattgcgattctcttcatcgaatactgcgacggcatgtgtgggatgagaatgttggataagttgccttagcgcatgttcacaagcaggaatgcatgggctgccctgtacagcatgaatgcgtcggataaggttaagagcatcaacaataagaaggtgtatcatatgggatcactttaaataacataatgctccatccgtggagcgtggatattttttcagataattttatttgatgatttcgtagcaaggttcgtaggcagtacctcccggtagtttcattcggtgctgttccacaaagtctttcagtagcttatccatatggcgcattattttaacatccccgtggattttgaatggaccttgttgttcaatcgattgaatacccatctcttttacattgcctgcaacaattccggaaaaagcccggcgcaatgacgctgccagtttttcaggtgactgatcaggatagagattgaggttagccatgttttcatgtgatggttcaaacggttgttgcaaatcataattgatcttcattgaccaattaaaactgtatgcatcaccggtactgtggcgattatctctcactaatggcatcgcttttttcattattctggcaacttcaggcgcattatcaatgatgatgtgataatagcgtcgagtctctttgcccaatgtatgaacaataaattcgtccagaacttggaaataggcttcactctgcttcggtccggtaagaatcaatggcagtatttgctcctgattttctggattcatcagaatacctagcaaataaagtaattcttctgctgtaccaacaccacctgggaaaataacgataccatgagcaatacgaacaaaagcttccagacgtttttcgatgtctggcatgataattagctcgttcactaatggatttgggggttcagccgcaatgattgaaggctcggtaataccaataaaacggctatttttgtaattctgttgggcatggccgacagccgcgcctttcattggtgcttccattgctccggggccacagccggtacagatattcagtccacgtaacccaagttgattaccgactttacggccatactgatactcttgcttactaattgagtggcctccccaacagacgatcatgttgagatcttcatcggtatgcagtgctctggcgtggcgcagaatagagaatattctgttggtgatatacgcgctattctctgaatcggaataatcctgttgttctggatcggtaatctgtgtatgaacgaacaagatatcccgcagcactgcgaacaggttagcttgtagtgaatgaataatttttccatcaacgaatgcatcttctggtggatccaccagctccagttttaccccgcgctcacggcgcaatacgttaatctcaaaatcggtgtatttagagagcagctctttgctattatcggtttggctacctgaattgagtacggccagtgagcaattacggaacaggcgatacagatcactttttgcggtactctttagcatatctacttcaagttgagataataaatccatcgagccgagtgggttgatatgtgtgatcaagaatgactccttgtataccgtgtatggattacatatcaatatcactaaactgaatgtattacatgccctatttcagcttatttttcacaaattgcgcttaggaaagcagatttaaaatggatttattgacgtgccaatcggcctgttgctggaacaaagccttcactatttgtacgccacggattgatatctagccccccacgacgggtataacgagcgtagactgagagcttttcgggtgcacataattgttgtaaatcgctgaagatacgctcgacacattgctcgtgaaactcattgtgatgccggaatgatatcaagtaacgtaacaatgcttcccgattgatttttgaccctttgtagtgaatctggacagatccccagtcaggttgatgagtgatcaggcaattagatttcagcagatggctaaccaaaacttcttctacctgcgggccttgcgctgcattttgcagataatgacgattgaaatcatattcagtcacttcaatgtcctgatcatcaatacattcacctgtaaaagtggagattggctgattattgaaatgatctaagtgatgaagtgccacttccacctcaccttcagcacaagcagccagatcgcgctgtagtgtttcttcgacggcttgccagttttcaaaacgagtctgattaaagctgttcagatagagcttaaaacttttagattcaatcaggtttgtgcttgctgcatttaaactaacatgcccgacagcaacttgtggcaaaccgcggttattcagccatgacagctcatacagtgtccagatatcagcgccatgaaacggcaaattatcagggaaaatttccagcggttcacggttcatattgcggggtacagcttgcaataagctggcatcatattggtcacgatataaagtggttttacctagcgtaagctgctcaagagcttggtgatcccgatataatgacatgttattcctcaaaatctgatagtagtgatggcttaagtttagcaagttagcgcgtttgtctgaattttatttatgcgctcaattcattatatttggtttaccatgacatgataatcacccctaacagttaccggttgaaaataatatgatttctaatgttacagaagcgttgtctaattttacccgttgttatgttgatttgtggcaaaaggaaaccggggcccctcctgccagccgtgaactttatggtgtgccatcaccttgtattacccagactggtgacaacatcgtttattggctgccacagccttttcctttagaggaaaagttgaatagcgtcgaagttgcactggatattcaattacaaccggcaattcatgatttttatacatcacaattggccggtgatatgacggtaacgtttgaaggtcaacggcttagtttgattcaggtttggagtgaggatgattttatccgtttacaggaaaacctgataggacatttagtgacgcagaaacggctgaaactgtcgccaacggcatttattgcgacgatggaatcagatgatatgggtatcatttctctgtgtaatttgaccggtgaagtgatcttggaacagtttggcagtcataaacgagagcgcttatttaccgacttagttgggtttcttggcgcaattgagcctgtctttatgcgttaggccccgatttttaacgctgcctttgtgagatatctcttacacttcatgtaagagatatcattgtttacttttgtgagtttcacattagtttattattttcattttatttcaataggctataaataatcacagattttgttttctgtcctgacttactggttccattatgtgtagcttgtttcatcgaatgaattaattcattctgtcctcagcaggaaaggaatcattgcgcacaatttctcaaggacagatgagtgatgatggtcaggatgacaaatgcataacaggatcgtatgcaacataaataaaatgatgggtaacggataaccaattagggacaatttgtcaaggagtgagcagggagcatattattagcgggattgctataaaatcaacttaaggggagcgcttgtgcgctcccttctcttattcactggagcaagcaaattttcagcttaaggggtatcgatggtattcttgctaactgggttgttttgagtaaaaactgagtcaggctgaaaatatgagtactgcaaaacaaattctgcataaattacagttaattgaagaagccatgagggaaattgacctgtggcagagccatccgcccaaaccggaagctttcgaaagtgttgagccgttttccattgatcggatgttagctgaagagtggttgcagtgggtattgattccgagaatgtatgcattgttggagcagggattggcgttgcctacggcatttgctatcgcgccttactttgaggagtcttataaagaagatactaccgggcgttaccagcaactgtttgaacatcttcgtgcgttggatcgcttatttatgcaggataacgtctgatatgttggaagtgttataccaggatgatcatattgtggcagttaacaagccagcggggtggttagttcatcgtagctggttggcgcgtcatgaaacggtctttgttatgcagacattgcgtgatcagattggtcagcatgtttttccggtacaccgtctggatagaccaacgtctggcgtattgctgatggcgctttccagcgatgttgctcgccagctctctcaacagtttgaacatcatcaattacaaaaaacttatcatgctgtcgtgcgcggttatgtgttggaatcagctattattgattacgctttggttgaggagctggataagatcgccgataaatttgcagagggtgataaagaggcccaatcctgcgtgacttattaccgaccactggcaacggtggagtgtccggtagaaataggtcgttatcctacatcacgttttagtttgttggaattgacaccgaaaacaggtcgaaaacatcaattaagacgccatatggcacatattcgtcaccccattattggtgatacaacacatggcgatttacggcaaaacagaggcgttgctgttcattatcaaaccagccggttaatgcttcatgccagttatcttgagttggatcatcctgttacgggggagaaattatcgcttacggcaaaatgggatgcatcatggcagcatttaatacaacaatttggctggcaaggtattatccccgatttggaatatgatgaagcgagtaagatagaaaattttatagattaggatattttcaaagaatacctgttgcctttatctcttaattattttaattaagagataaaggcaatattaatatattattagcaaaggttgataatatataaatttattggtttttgctgattatattattatttgaattgattattgaaagaaaaatagtcgagataactattgaagagataaataatattgtaaatccagcaatgatttcttcaatgccaacacctaaataaatagtataaaaaaggatgatcatagtaataaagacataaatccctgactgcatacccaaagtataaagagagttttttgaatgtaatcctagataagagaaaaaaacaggttgcataatggtattagctaaaaataccataattgtgaatagtaaatagagtatgccagaatttatcataatgccaagtaaacagaatccgagggaaaataattgcatgatattacctaccatgattcttttggttaaaagtgcggatttaatgattttcatgatgccaattgcacaggggaaccatatagcttttaaagccagtgaaatagataattgaagcaatagaataaataaaagcagcaaaaaaatctgctgatgtacgggaatttaaacctaaaagagagaaaataacgggaattgaaaatggcaggcttaataacgccaggcttaaaatagaaaaatcactattcgttttcttttcattgcctgcggttataagaatatttcttcccattataacaataaatccacttattactccccataatattctatgcggagtatccagccaaactggaataaatgttgtttcttttgcaaagagaatgcagtttatcgttgttagtaataaaaagaagccaaaaatatttctttcaaaaaaagaaatattcatttttcgaataaaaaaggatacggtcatacatcccagagataaccccaataaataggaaaaaacaggaatataagcgtttaaaatcatgcttccatctttaagcacggtatctacccaaatcatcaggccagatgagacggtaatatttgcggcacttaatagtatacttagcacaacagctctattgttaaacatggtgatggttttccttatttagtgcttatttttgccattctattaatctcattatgctattattgatcttgaagaaaaggatatagtcatttttcatattaatatcaatatcacaactaaagttgtttaaaaaagtgattttaacactgaattattattgattaaataacttgatttaagacgacgtctttacggcggggagcagtcacgatcctgtttacatgacagagtgaacttaatagtggcaatatttgatttgatacgacgacttagctggtaaaggtaattatccctgatttgggaagggttgagttttctgctgttgccagcgaggataactaataattcctttaaaaagagataataattatggcaaagataggtatttttgttggtactgtttatggtaacgcgcttgctgtcgcagaagaagcacagcagatccttgaacaacaaggtcatgatgtagaagtctttgaagaaggggagctggaacagtggcaatcctatcttgatcaaatggttttagttatcacttcaacaaccgggcaaggggatttgcctgataatattcggcctctttactatgctttgcgagatgagcaggggtatcagccagaattacgctatggcgtgatcgctttgggtgatagcagttacgagaatttttgtggtggtggccgcacttttgatgagttgcttcaagagcaaggagcaataagaatcggtgaagttttgatggtggatgcagtggaagaagctgaaccggaagtttttgctcagccttggatcaggcaatggggagaattaattgaataattacaatacaccgcttatatcgaataggatataagcggtgtaattaatagaactgttttatttacgggttagtttttccagatcggcttcaatctcggcaattttgttggcaacaacgtgttcaagatgacgtaggtcatcgaggattttgtgtttcaagtcgatttctacttggtcacgtttgcaaatctgatccaactcttcaatcacataacgcaggttggtattgatttcgttgatctctttgtatccttgctctgcattgtttgcagtcacagttttgcgctggcgcggatatttgaatttcacgcttttagcaaagaattcacctttatccttacgaaaatagattttcagaatatcgttgttagcttcttgacgcagactatagcggtcaatttcttcgggatatgtgatccccagactctttaagttatcgtacatggcaccaccttaagggtatttttcccagtaggttattctatgcgtcattttgaatccggatcgtctccgaataccttacgtactctgtatatgtttcggagcgtacacgttgtccgtattcaaactgcttatattaataacactaactgaggtcggtaatgatgataaaaagcaaaaaaatagcggacttatttattatccgctattttaaagtttaatctatcgatctgagtagttcattaatgcccacttttccttgtgttttggcatccacttttttgacaatgacagcacaatacaggctgtaactaccatcttttgatgggaggttgccagagacaacaacagaacccgcagggactcgaccataatggatttctcctgtttcacgatcatagattttggtgctttgaccaatataaacacccattgaaatcactgaaccctcttcgataatcacaccttctacaatttcagaacgggcaccaataaagcagttgtcttcaataatggttgggttcgcttgcaatggttctaatacgccgccgatgccgacaccaccagataaatggacatttttaccaatttgggcacaggagccgactgttgtccaagtatctaccattgttccttcatcaacataagcgccgatgttgacataggaaggcatcagtacgcagttacgggcaataaaggccccttgacgtgctgccgcaggaggcactacacgaaagccctctttttcaaatcttgtctgatcatagtcagagaatttcatcgggactttatcgaaataacggctttctgtgccatcgatgatctgattttcattaatacggaaagagagcagtacagccatttttagccattgatgagtgacccactgaccgtcaattttctctgcaacgcgcagttttccactatccagcaggttgatgacttgagtaacagcatcacgtgtttcatggttgacagttgctggagtaagcgttgcgcggttttcaaatgcactttcgataatggattgtaattgctgcattgcatcggttccttggttatcgtccgaatcatgggcttatacccgtcatctttcaagttgcctctttgttggctgcacttactcaccccggtcacagagttatctctgctcccggggattcgctcccttgccgccgcgatgcatcttgaaatccatagggtatatattgagttatattttatcctttggatttagggttgctgtcaacctttctgataattcttctctgacttttttatttaatgctttatggtctttatccgccagaacgaaaaaatcttcgacacgttcaccgatggtggtgatatgtgcaccatgcagtgaaacccccatttcggcgaaaatattaccgacccttgccagcaaccccggttgatccagggcaaatagttccatataggttcgtcgttcgttatgggtaggtaagaaggtgacttttgttggtacgttgaagtgacgcagtttggttggcaattttcgtgttttcggtgttttggtatggggagctagaacaacttgtaaaagtgcgttacgtattatttcatggcgatctgatgctaaaggatgaccattgggttccagtaccacgaaagtgtccattgtcataccatcacgattggtaaagatctgagcatgatgaacactcaggttacgtctatccagttcgccgacaaccgccgcaaacaaggaaggacgatctacgctccagataaaaatttctgtaccgccgcgggttggcttggtacttattagtatcagtgactcttgagaatcatgctgcacgagatgatgggcgtgccaggcaagttgttttggcgtatgccgaagaaaataatctgcatgacaacgactccaaagctgatgaagcttctgttcgttaatattatcttggcgcaacagagcaagtgcctgaaaacggttatgtcggatgcgttcccgaaaatctggcgtatttccctggcgcaattgattctctgtagagaaatagagttcccgtaacaaactttgcttccaactattccataggttgacattggtggcgcagatatcagcgactgtcaggcagatcaggtaacgtaaccgggtttcattgaggatttgatgggtaaattgcttgatgatttctggatcctgaatatctcgccgttgagctgtgactgacattaatagatgatgacgaactagccaggctaccaaatcagcttctcgtgagttaagcccatgtttcagtgaaaacgctagcgcatcgtcagcgccaagttcagaatggtcgccggtacgccctttggcgatatcatgaaatagtgcagcaagatgtagaagctctggttgaggcagacgagggtatagctcaacacagagtggatgggctggacgattattttcattggcaaaactttccagttttctcagtacgcggatggtatgttcatccacggtataggcgtgaaacagatcaaactgcatctgaccgacgatattgccccaaagcggtgtgtaagcgccaaggacactgtggcgatgcatgggtacaaatgcgctttcaactgctcttgggtgacgtaggatgtccataaagatttggcgagcttccggtaattcacacaatggctgagacaagttgcggcgtgcataacggaggtggcgtaacgtagtagaataaataccttgaacttcttcatgttccgccatgcgataaaacattcgcataatagctgcgggttctttgataaacagggtttcatcgatgagatcaataagttgcccccgtagctggaattcactatccagcgagcgggatttttcattggtttccaatgccagaatggcttcatcaaacagttgcagtagcatattgttaagttcgctaacgcggcgtgtcatccggtagaaatctttcatcattcgttctaccggttgattacgttctccgtgatagcctagtaattgagcaatactgaactggcgatcaaataacaggcgattatcataacgattgactaccagatgaagagcaaagcggatacgccagaggaagctttggcattcatttaattcattacgttcttctgctgtcaggaaaccaaaatcgaccatttcatctatggaggttgcaccaaaatggcggcgggcaacccatagtaaggtatgaatgtctcgcaatcctccggggctgcttttgatatcaggttccaggttataactggtgctgtgatagcgctgatggcgttcgtgttgttcgacaattttggcatcaaagaattcagtggaaggccaaaaaccatcactgaaggtatgtcgctgtaatcgaagaaaaatggaggaatcgccacaaattaaccgtgattcgattaaattcgtcgcaatagtcagatctgataacccttccagcaaacactcttcaagtgtgcgaacactgtggccgacttccagtcggatatcccatagtaaagtgataaattgcccgacattctgagcttgaggcggtgtgagtggttgttcactgagtatcagcacgtcaatgtcagatagcggatgcagttcccgccggccatatccgccgacggcaatcaatgaaagtgatgaaattttatcaaatctataggcataccataattgctgtaacaactggtctatgtaatcactgcgtgcagaaatcaaggcttctgcggaaatacccgctttaaatgcatgttccagccaaagctgaaattcttcgaggtgctgtttcaacacagggtagcgaagatcttcactagaaaaatcagcgggggaaagtggtggaataggggcttgaattgtggcgatatctgctgacataagtataaacctatgagaaaggcgaatcataacagtcagattactgagaaagtagggtgttgaacaaggggatattgcggaggagagatgagtagccttgtatgatttcaacaaggcttcatcgtttactgttttaattattcatttactaatactgaggaaagtgctggctcttcttctttacgcaatgtcatgatttcacagccgttatcagtaacaacaatcgtatgttcatactgtgcagacaggctgcggtccttggttttgactgtccagccatctttcatggtacggatgtggtagtcaccggtgttaaccattggctcaatagtgaaagccatccctttttgcagaacaacaccactatcatctgcatcatagtgcagtacttgtggttcctcgtggaagcctgcgccgatgccgtgaccacaatattcacggaccacagaaaaatcgttggcttcaacaaattgttggatggctctaccgagggtgcgcagacgaataccgggtttcaccattttcaaggctagatagaggctttcctgagtgatgcggcacaagcgctcaccctgaatggttggtttaccaactatgaacatttttgatgtatcaccgtggaagccctctttgatgacagtcacatcgatattaacaatatcgccatctttcaaggtcttatcatcactagggataccatgacacactacgtcattaacagagatacaaacagattttgggaaaccgtgataaccaaggcaggcagagacagcctgttgtttattggtaatgtgatcgtgacagatacgatctaattcacctgttgttacaccgggtttgacgtaaggttcaataatttctaacacttctgccgccagccgaccggcgacgcgcatttttttaatatcttcagaggttttaattgagattgccatgaaacttatccattcaaaaccagcgaatctgctggttgtctgtttttcaacaaggaaaaaattattgaactaatggtatcagcctacagaatatctgccaataacagttggcagccctatttccctcgttacctttatttacccatcaagaataccgttcgtaaccgggcttttcttttcacattgagctatcagaaaatggcaacaaaagttggtgtcttaggcgggtttatgatataaagcgcgccggcgttctatgtctttgccactgaggcaaaacagagtggcgttaaacatactcactgtgtaaataacacacacgggtcggcacatacaccggggtgctctcatgcagaacatgcagctaaagagtcggtgttatggggctcgtggaggcataaccccaacttaatattttacagaggtttacaatggcaactgtttccatgcgcgatatgctgcaagcgggcgttcacttcggtcaccagactcgttactggaacccaaaaatgaaaccattcatctttggtgctcgtaacaaagtgcatatcatcaacctggaaaaaactgttccaatgttcaacgatgcgttagctgaactgaacaaaattgcttcacgcaaaggcaaaattctgtttgttggtactaagcgtgctgcgagcgaagcggttaaagaagcagctcagaactgtgatcaattcttcgttaatcaccgttggttgggcggtatgctgactaactggaaaaccgttcgtcaatccatcaaacgtttgaaagatttagaagcacagtctcaggacggtacttttgacaaactgaccaagaaagaagcgttaattcgttctcgtgaacttggtaagttagaaaatagtctgggcggtatcaaagatatgggcggcttacctgatgctctgtttgttatcgatgctgaacatgaacacattgctatcaaagaagcaaacaacctgggtatcccggtattcgctgttgttgatactaactctgatccagatggtgttgatttcatcatccctggtaatgatgacgcaatccgtgcagtaaaactgtatctaggtgctgttgctactgctgttcgtgaaggtcgttctcaagatctggctgttcaggcagaagaaagctttgtagaagctgaataataaggcaagctcattattgagcccttattaaccaggtattgaaatatattggttaggggggcctgttatggcccccttttacgtatctgatataagaactatccatgcggaatactctcttcctgcgggatacatcgaggaataaaacaaatgtctggaattaccgctgctttggtaaaagaactgcgtgagcgtactggcgcaggtatgatggaatgtaaaaaagcgctggttgaagctaatggtgatatcgaattagcgattgacaacatgcgtaaatcaggtcaagcgaaagcggctaagaaagctggccgtgttgctgctgaaggtatcatcttggcggaagtggctgctgatggcaaattcggcgctctggttgaactgaactgtgaaactgacttcgttgccaaagatgcaggcttcatcgctttcggtaaagaagttatggcaacagtattggctgataaaatctctgatattgaaactctgaaagctaagtttgaagaacagcgtactgcactggttgctaagatcggtgaaaacattaacattcgtcgcgtttctgtattagaaggtgaacaactgggtacttatctgcatggtgcacgtatcggtgttctggttgcggctgaaggcgctaatgaagagctgattaagcatgtggctatgcacatcgccgcaagcaagccagaatatgttaacccaagtgatgtaccggctgatgttgttgatcgtgagcaccaaatccaactggatatcgcaatgcagtctggcaagccacgcgaaatcgcagagaaaatggtttctggtcgtatgaataaattcactggtgagatttctctgacaggtcagaatttcgtgatggatccaagcaaaacagttggcgatctattgaaagaaaacaatgctacagtgaccagtttcatccgttatgaagtgggtgaaggtattgagaaagttgagactgatttcgcagcagaagttgctgcaatgagtaaatagtcttaatttttacaaacagggccgccaaatggcggttctgttttatctaatctaaaccgcctatcccagtaggtgttgagtttttgcatctggccagaatggcccggatgtatgtaaatcccccaatatacttttctgcttaggacagaacatcatggcaaccaatgcaaaacccgtatatcagcgtatcctgcttaaactcagtggagaagccctgcaaggtgcagaaggttttggtatagatgccagcgtgttagatcgcatggctcaggaggtcaaagaactggttgagttaggcgtagaagtcggtgtcgtcattggcggtggtaatctgtttcgtggtgctggcttggcagaagcagggatgaaccgtgtagtcggcgaccacatgggcatgttggcaacagtgatgaatggtctggcaatgcgggacgcattacatcgcgcctatgtgaacgcccgtctaatgtctgcgattcctttaaatggcgtttgcgataactatagttgggcagaagcaattagtttattacgtcatggtcgtgttgttattttctctgcgggtaccggcaatccgttctttactacagattcggcagcgtgtttgcgtggtattgagattgaagcagatgttgtgctaaaagcaactaaagtagatggtgtttactcggctgatccggctaaagattcggaagcggtattgttcgataagctctcttaccagcaggtattagagcgtgaattgaaagttatggatttggcggcattcacgttggctcgtgatcacagcttacccattcgcgtatttaacatgaataagccgggagcgttgcgtcgtgtggtaatgggagaaaatgaaggcaccctgatttttcacgagtaatgttcaaagacaccagagatgtttggcggtatgatgagtcgcctgatacgccaaatttaacaaacatggtcataatagcttatggctttaaaacaaccagttcccaagggtttgtaacgtgattaatgaaatcaaaaaagacgcacaagaccgtatggaaaagagcgtcgaagcacttaaaaaccaaatcagcaaggttcgtactggccgagcttctcctagtctgctggatggtatcattgttgagtattatggtgcaccaacgcctttgcgtcagcttgctaacgtcatcgctgaggatgcacgtaccttggctatcacggtatttgatcgtactatgacgccggcgattgaaaaggcaatcatggcttctgatttagggctgaatccatcttctgcggggacaacaattcgtgttcctttaccaccattgacagaagagcgtcgtaaagatctgattaaggtggttcgtagcgaagctgagcaggggcgtgtctctgtacgtaatattcgtcgtgacgctaacgacaaaatcaaagcactgctgaaagacaaagagatcagtgaagatgatgagcgtcgtgcgcaggatgatattcaaaagctgacggataatttcatcaaaaaagttgatgaagctttaacaaagaaagaagaagaactgatggagttctaatctctttcatgagatatataccttatggatttcaagatgcttcgcggcggcaagggagcgaattcccgggagcagagataactctgtgaccggggtgagtgagtgcagccaacaaagaggcaacttgaaagatgacgggtatatcaagcgccgctatcttgtggcgctatttttattcggcatttctctgaggtcatgagcgttcatagccaggcgaatcagacaagtatcaatacacatcaaataaaacaattcagagcatcagtatgaaaaggttgaccatccttggttccacaggttccgtgggcaaaagtacacttactgtagttcgcaataatcctgataaattcaaagtaacagcgcttgccgctggaaaaaatatccaagttatggctgagcaatgtctggagtttcggcctcaatatgctgcaatggcagatgaagtttccgcaaaagagttgcgtcagctgcttattgaacaaggttgtaaaaccgaggtatttttcggggaacaggctgcgtgtgatttggctgctttgaatgatgttgatcaggttatgtctgggattgttggtgtggctggtttattgccaacgctggctgccatccgggcgggtaaacagattttacttgctaataaagagtcgctgatcaccagcggtcggttttttatggatgctgtagcgaaacataatgctcaattattacccattgacagtgagcataatgctattttccagagcttaccagaggtaatacaacgaaaccttgggcgcggagatctaaaacaatatggaattgctaatatcattttgacaggatctggcgggccttttcgtcatacccctttagagcaattagcttttgtaacaccggaccaagcttgtgctcatccgaattggtcgatggggcgtaagatttcggtagattctgcgacaatgatgaataagggtctggaatatattgaggcgtgttgtctgttcaatgcatctgctgcggaaatggaagtggtagttcatcctcagtcagttattcactctatggtccgttatcaggatggcagcgttattgctcaattaggaacaccggatatgtgtacacccattgcctatgcaatggcatacccaaatcgtattgcttctggtgttgaacctcttgatttttattctttaggtacactgacgttctcgaaaccagattatgaacggtatccatgtttgaaactggctattgaagcttgccacgcaggtcaggctgcaacgacggtgttgaatgcagcgaatgaagaaatcgttaagatttttttacaaaatggaatctctttcacagatattgcaattataaaccggcaggttgtagaaaaactaaatttgtcggaacctcagagcattgaggaagtcttacagattgataatctcgcaagagatttagccataaagactattcgttcatttatcagatagtctttgattggcaaatgggtatttgtccgcatttttacctgatggtatagtttgcgtataactgttggttgatataattaacggttcagattttggaagttctcttccggataattaggcttttacccaggccgtggataccagacacggcttttttatgtttggatgcctgaacatgtaagagaattaccctgaccagcaaaggattaattgagtgatattatccagcgatcatcatcagaacgatttatcgtcattattacctaaacatgttgccattattatggatggtaacggccgttgggcaaagaaacgagggaaattaagagcctttggtcatcgtgcagggattaaagcggtacgtagtgcggtgagtttctcggctaaacataacattgagtcactgacgttgtacgctttcagtagtgaaaactggaatcggccggaacaagaagtcagctctttaatggaattatttatttttgcactagatagcgaaatcaaaagtttacataagcataatattagattatctgttattggtgatatcggccgcttcagtgagcgtttacaggatcgaatccatcgctcagttaagttgaccgctaataatacgggtctgcaacttaatattgctgcaaattatggtggtcgttgggatattgttcaaagtgttcagaaaattgctcagcagattaaggataattctcttgagcaacaggatattactgaagaattagttaataattatatgaatctaagccagcagccccaggttgatttggtcatcagaaccggaggtgaacatcgtatcagtaattttctgttatggcagatagcttatgcagaattctattttaccgatatactctggcctgattttgatgaaaacgtttttgaaggtgcaattaatgcctttgccaaaagagaacgccggtttggcggaacaataccagacgatgccgatgtgggatcataggaggaactcttgctgaagtaccgccttataacggctgtgatattaatccctcttgtgattgccgctctgtttttgctgccaccagtagcgtttgggctggtgattattgctgtttcagcacttgctgcgtgggaatgggggcaattcgctggcttatttaaccaaaagaaacgggctattttggcagttctgtttgctattggtttattggccttacaatatactctgccagatttcactgatttgattggacaacctcaaatcacttttatcctatgggggggaatgatttggtggattgttgcgacgcttctggttgttacctatccttcttccgctgtaatttggaagagatccattttattgcgccttttgtttggtgtcctgacattagtgccgttttactgtggaatgatggtgttacggactcagggatatgatgataattcatattatggtgcatggtggttactgtatgtcatgttgctagtgtggggagcggattccggcgcttatctcttcggacgtactttaggtaaacgtaaaatggcaccgaaagtttctccaggaaaaacgctggaaggattaatcggggggttaatgacagcggccattatttcatggttgtttgggaaatatgctccagtacctgcaatgcctgaaaaactcatgttgtgctctgctattgttgttatcgcttctgtatttggtgatttgacagagagtatgttcaaacgtgaatcgggtattaaggatagcagccagctaattccgggacatggcggtgttatggatcgtattgatagcctgacggctgcgatccctgtttttactggcctaatgttgctggtattttgatctctatgtttgacggcgtttgaagaatatgatgggaattctctggaatctggcggcttttattattgcgctagggatattgatcactgtgcatgagtttggccatttttgggtggccagaaagtgtggtattcacgttgaacgtttctccattggttttggtaaagctctatggcggcgtacagatcgtcaaggaactgaatatgttgtagcccttattccactggggggatatgtgaaaatgcttgatgagcgtgtttcacctgtttctcctgaacaccgtcatatggcatttaataataaaacacttggtcagcgtgctgcggtggtcagtgccgggccaattgctaactttttattggcggctgtggtttattggttggtgtttattattggtgtgccggcaatccgtcctgttgttgcggatatcaaaccagattctatcgctgcgcaagcaaatatttcatcgggaatggaactaaaatccgtagatggtatcgaaacgcctgattggaattcagttcgttttgctctggtaggtaagataggtgacgataacatgactgttcaggttatttctccaggctcatcatattcggtggagaaaactctggatttgcagcaatggagttttgatccggataaacaggatcctgtgttgtcattaggaattatgcccgtcggtcctcgtttggattctctggtggaaaaagttatccctggctccgcagcagaaaaagcgggtttgcaaaagggggataggatagttaaagtcggtgaccaggaaatagatgtttggcatacttttacatcctttgtcagcaataatccaaatgtcccgctggaactttccgtggatcgggctggtcatattatttctctctctatgacgccggaagcaagacaacagtctggtggcaggaaagttggttttgccggtgtggaactgcgagttgtgccattagccgatgaatacagaatcgttcagcaatacgggcctttctctgccatgtatcaggcaggagagaagacttggcaactgatgcgattaactgtcagtatgattggtaagctgatcgttggtgatgtgaaaattaacaacctgagtggacctatctctatcgctaaaggggcaggggtgtcggctgattccggcttggtgtattatttgatgtttttggcgctaataagtgtcaatcttggggttattaatttgatcccattacctgtgttagatggtggacacttgctcttcttgtttatcgaaaagataaaaggtgggccagtttccgagcgtgtacaagacttcagctatcgcatcggtgccatagtactggtgttattgatggggcttgcacttttcaatgatttctcccgtttttaaagcggaagactagttaggaagacgcattacaacgatggcgatgaaaaagttactcatagcgtcgctgctgtttggcagcgccactgcatacggtgcagacggattcgtagttcaggacattcactttgagggtcttcaacgcgtcgccgtaggtgcagcattactgaatatgccagttcgcgtaggtgatacggtcagcgatgaagatatcggtcgtaccattcatgcactatttgctactggtaactttgaagacgttcgtgtcctgcgtgatagcaatacacttattgttcaagtaaaagaacggccgactattgccagcatcactttctccggcaataaatcggtgaaagatgacatgttgaaacaaaaccttgaggcatctcatgttcggatcggcgaagcccttgaccgcacgatgctgtccaatatcgaaagagggttggaggatttctattacagtgtgggtaaatacaacgccagtgtaaaagcggttgttacgccacttccacgtaaccgtgtcgatttaaaactggttttcgctgaaggtgtctcggcaaaaatccagcaaattaacattgttggtaataaatcattttcttctgatgagttattgaatcgtttccaacttagagatgatgtgccgtggtggaatttgactgccgatcagaaatatcagaaacaaaagctgactggtgaccttgaagcattgcgcagtttttaccttgatcgcggttatgcccgttttaacattgattcgactcaagtcagtttgacgccagataaaaaaggtatttatgtcacgataaatataactgaaggtgatcaatacaaaatatcaggtattgacctgaacggtaatatggcgggttatcagtcagaaattactaaactggctgccattgagcctggatctctgtataacgggactcaggtgactaaaatggaaaatgacatcaagaacttgcttggtcgctatggttatgcttacccacgagtgatgacgcaacctgaaatcaatgatcaaggcaagacagtaaaactgcatgtcaatattgatgcaggtaaccgtttctatgttcgtaaaattcgtttctctggtaatgacaccactaaagattctgttctgcgtcgtgaaatgcgtcagatggaaagagcatggttaggaagtgatctgattgaactgggtaaagagcgccttaaccgtttgggttatttcgaaacggtagatgttgaaactcagcgtgtaccaggcagccctgatcaggtagatgttgtttataaagttaaagagcgtaataccggctctttgaactttggtgttggttttggtacagaaagtggcgttagtttccagattggtgctcagcaggataactggttgggtacaggtaattctgtgggggttaatgccagtaagaacgattattcaacctatgcagagctctccttcactgatccgtacttcacggttaatggtgtgagccttggtggtcgggtattctacaacgatttcagggctgatgatgctgaattatccggctatactaaccaaagctacggtatagatggtttcctcggttttccgattaatgaaaataactctctgcgttttggattaaattatgttcataactcgctgtctgatatgcttccgcaggctgcaatgtggcgttatttgaattccatgggagagaaaccagattataaaagtaaagctgagttcaaagcagatgactttgctttgaatgtaggttggacatataacaaccttgaccgtggcttcttcccaacatccggtgtgaaatcgacgctgaatggtaaagtgactattcctggttcggataacgaattctataaagtaacttttgatacctctgcgtattatccgattaatgacgatcgtacttgggtgatcttggggcgcagccgtttaggttatggtgatggattaggcggtaaagagttaccattctatgaaaacttttatgcaggtggctccagtacggttcgtggtttccgttctaacaatatcggccctaaagcgatttatatgaatggaaaagatgaccctaagaaagatagcccatctcgcgatgccgtgggggggaacgcaatggcggtagccagccttgagttgattactccgacgccattcctcgatagtaagtattcgaattctgtccgaacttcattctttattgattcaggtacggtttgggatacttattggaatgattctgctgcgatgaaaggcagtggtatacctgattacggtaaaccaggtaatatccgcgtttcagcgggtattgcattgcaatgggtgtctcctttaggtccactggtgttctcttatgctaagccgatcaaagattacgaaggtgatagatcagagcaattccaatttaatattggcaaaacctggtgataatgcgtttttatcttattattgatagagcaagctctgaaatcgtaggtttcagagcattaactaagttttccaataggttacagatagcgtggtttaaggagtttatagtgaaaaaattgttgtgtgcagcaagctttggtattgcattagctttctctgttggtgctcaggcagcagacaaaattgccgttgtaaatgttggtgagattttccagcagctgccagcccgcgaagctgttgtgaagcagttggaaaatgagtttaaaaaccgcgcatctgaattgcaacggatggaaactgacttgcagtccaagatccagaaattacagcgtgatggctccactatgaaatccagtgaacgtactaatctggaaaaagaggtgatggctaagcgtgaagaatttgccaaaaaagcccaagcttttgaacaagatcatcgtcgtcgcgagatggaagaacgcaacaaaattctaagtcgtattcaggacgcaatcaaagtggttgctggcaaagaaggctatgatgtcgttattgatgcgaatgctgttgcttattcagtatctggcaaaaatattactacaagtgtattgaaacaggttaaataacagatgtcttcaattcgattggctgatttagctcagcagttgaatgcacaattacatggtgatggcgatattgttatcaccagtattgcaccaatgcattcggccaatggcgaacagatcacttttttgtctgacagtcgttatcgtgaacgtttgggtgaatgtcaggctgccgctgtcgttcttcaggcgtcagatcttccttattgcaatattccagcgttggttgtcgccaatccttatctggcatatgcctatatggctcagattatggatacaacaccgattcccgcacaggatattcactcttctgcggtgatttcacctcaggcaactttgggtaaaaacgttgctgtcggagccaatgcggttatcgaatctggcgttgttcttggcgacaatgttgttatcggtgcaggctgctttattggtaaaaatacgcgtattggagcaggaagccgtctttgggcgaatgtctctgtttatcataatgttgaaatgggtgaacagtgtttgatccagtcaggagcagtgattgggtctgatggttttggctatgcgaatgatcgtggcaagtgggttaaaatccctcaattaggttcagtcattattggtgaccgagttgagattggtgcctgtacaactattgatcgaggagctttagataataccattattggcaatggcgtcattatcgataaccagtgtcagattgcgcataatgttatcattggtgacaatacggcggttgctggcggtgtgatcatggccggtagtctgaaaattggttgttactgtatgattggtggtgccagtgtcattaatgggcatatggaaatctgtgataaggtaacagtcacggggatgagtatggtgatgcgccctatcactgaacctggtgtatactcctctgggattccagcacaaccaaataaagtttggcgtaagacggcagctttagtcatgaatatcaatgaaatgaataaacgtcttaagtcaatggagagtaagctggaagacgaaaacgagtaattgcactatatttaattgtactacatttaattgtactatatttaattgcactatatttttggttgtgtcttattttgcggcctgcctgggaactctggatttggggtttaagcgggccgtgtcgttaatacaattagtccttttgacaggaagagtatttagatgagtgataatcatactctgcacattgaagaaattttagatctacttccacatcgttatccgtttttattagtggatcgcgtgcttgattttgaggaaggtaaattcttacgtgcagtaaaaaacgtatcttttaacgaacccttctttcaggggcattttcccggcaaacctattttcccaggtgttctgatccttgaagctatggcacaggccaccggaatcctggcatttaggagtgtgggcaagctagagccaaatgagctctattattttgccgctatcgatggtgcccgctttaaacgcccggtagtgcctggggatcaaatgatattagaagtagaatttattaaggagcgtcgaggggttgcgcgttgtagaggcgtagcgaaagtcgatggagaaatagcttgcgaagcagaaatgatgtgtgctcgccgtcgtgaggtttagtccatgattgatgaaaccgcttatatacatcctagcgctattgtagaagatggtgcggttattggtgccaatgttcgtattgggccgttttgttgtattggctctcaggttgaaattggtgaaggtacagagctgaagtctcatgttgttgtcaatggaataaccaaaatcggccgtgataatcagatttttcagtttgcttctattggtgaaatgaatcaggacctgaaatatcacggtgaaccaacccgagttgaaattggtgatcgtaaccgtatccgcgaaagtgtcaccattcatcgtggcactgtgcagggtggcggtgtaacgaaaatcggtaatgataatttgttgatggttaatgcccatattgctcatgactgtattgtcggtgaccgttgtgtcattgctaataatggtactttgggggggcatgttatcttgggtgattatgtcatcattggtggtatgagtgcgattcatcagttttgtcagattggctctcatgctatggtgggcgggtgttccggtgtggtacaggatattccgccatacgttattgctcaggggaatcatgcaacaccttttggcactaatgtcgaaggcttgaaacgccgtggttttgataaagattcattgaatgtaattagaaatgcgtacaagattttgtatcgtaatggaaaaacgttagaagaagcacaacaagaaattgctgagctggctgaaaataatcagcatgtaaaaatcttcagcgattttctggcaaattctacccgcggcatcgtccgttaagtagatgaaggatactcctttggctaccatttcttctattgatagtctgcgtccgttgactattggattaatcgccggagaaacttccggtgatatccttggagcaggtttaattcgtgcattaaaagctaaagtacctaatgcccgttttgttggtgtagcaggccctcttatgcaggctgaaggttgtgaagcttggtatgagatggaagagctagcagtaatggggattgtcgaagttctcggacgtttgcctcgtttgttgaaaatacgtaaggatctgacaacccgtttcacggaactaaagcctgatgtgtttgtgggcatcgatgcgccggatttcaatattacattagaaggtcggttaaaacagcgaggcatccgcaccattcattatgttagtccgtcggtatgggcttggcgtcagaaacgcgttttcaaaattggtaaagccacagatatggttctggctttcttaccttttgaaaaagcgttttacgataaatttaatgttccgtgccggtttattggacataccatggcggatgctatgccattgcaacccaataaagcgacggcacgtgagctattaggtattctgccagagtctgtttgcttggctttattgccggggagtcgccattctgaggttgagatgctgagtgcggattttcttaaaactgctcagttattgaagcgaaacatacctgatctgcatgtatttgtgccgttggtgaatgctaaacggcgtgaacaatttgagcgcattaagcaagaagttgcgccagagctgaatgttcatcttgtcgatggcaaagcgagagaaattatgatcgcaagtgatgccgcacttttggcctctggtactgctgctctggaatgtatgctggcaaagtgtccaatggtagttggttatcggatgaagccattgactttttggctggcaaaacgcctggtaaaaacgccttatgtttcattgcctaacttattatccggtgaagagttagttaaagaattattgcaggaaaaatgtcagccgcaaaaacttgcagatgagttgttgccgttactacaaggcagtgaaaaagttggagcattgaaacagacatttttacatttgcataaaagcattcgttgtaatgctgacgaacaggcagcacaagccgtgttggaattggcagggaaataatggaatttatatatcctcaggcaagtctgattgctggagttgatgaagttggtcgaggtccgttagtgggtgcagttgtgactgcggctgttattttagatccattgcagccgatagttggtttggctgattctaaaaaacttagtgaaaaacgccgcgaggcactgtatctggaaattacagaaaaagcattgtgctggagtttggggcgtgcagaaccggcagaaattgaccaattgaatatcctgcatgcaactatgcttgcgatgcaaagggctgtggctaatttgcctatttctcctgaatatgtgctgattgatggtaaccgttgccctaaattacctatgccggcacaagcggtgataaaaggcgatggactggttgctgaaatcagtgccgcttctattgtggcgaaagttaccagagatcgggaaatggctgaacttgatcagctgtttcctgaatatggatttgctaagcataaaggctacccgacggcatttcatttagaaaagttggttcagttgggagcgacagaacatcatcgtaaaagttttgcgccggttaagagagcaattggccttaaataaacttgttaactgaatacagctattcttcaaattaatatcatctggataaatatatggccgaaccccgttttgtgcacttacgtgttcacagcgactattcaatgattgatggcttagccaaaaccagccctttagtgaaaaaggttgcgcaattaggtatgccggcttttgcgatcactgattttactaatttgtgtgggctggtgagattttacggcagtgctcatggagcaggaataaaaccgattattggtgctgatttttatgtagaaagtgaactgcttggtgatgagcacgctagcttgaccattcttgcgcgcaataatacgggttaccataacctgacattgctgatatcagaggcttatcagaagggatatggtgcgattggtccgacaattaaacaggaatggctgataaaccataaagaagggctaattctgctctccggtggtcgtatgggggatgtgggtaagttcttgttgcgtggtaatcaggctatggtggaccaatgccttgagttttatcaggaacattttcccggctgttattatttggagctgatccgtactggccgtgcagatgaagaaagttatcttcatgcggcggtggcattggcaacggaaaaaagcctgcctgttgttgcaactaatgacgtttgtttcattgatggcgaagatttcgatgctcatgagattcgcgtagcgattcatgatggctataccttggctgatcctaaacgtccgaaaaattacagccctcagcaatatctgcgtagtgagcaggaaatgtgtgagctattcgctgatattcctgaagcgctggaaaacagtgtagaaattgctaagcgctgtaatgtcactattcgccttggtgaatatttcctgccgcaattccctacgggagaaatgagtaccgaagattatctgataaatagatctcaacaagggttggaagaacgtttagcatttctctacccggatcctaaagtacgcgcagaaaaacgtcctgaatatgatgagagactcgatattgaacttcgggttatcaaccaaatgggattcccgggctacttcctgatcgtgatggaattcattcagtggtcgaaagacaacggtgttcctgttggtccgggacgtggttcgggagcaggttctctggtggcttatgccctaaaaataaccgatctcgatcctttggaatttgatctgctctttgaacgattccttaaccctgaacgtgtttccatgcccgattttgacgtcgatttttgtatggaaaaacgcgatctagtgattgatcatgtggctgatatgtatggtcgtaatgccgtatctcagatcattacattcggtacaatggcagcgaaagcagtaattcgggatgttggccgcgtgctagggcatccatacggatttgttgataggatttccaaattgataccgcttgatcccggtatgacgttggagaaagcatttgccgctgagccacaacttcctgaaatctatgaagcggatgaggaagttaaagcactgatagatatggcgcgtaaattggaaggtgtcactcgtaatgcagggaaacatgcgggtggggtggttatcgccccaacgaagatcaccgatttttcgcctctctattgtgacccggaaggtttgaacccggttactcagtttgataaaaatgatgtggaatatgcagggttggtgaaatttgacttcctcgggctgagaacactgaccattatcaactgggcattggagatgatcaacgcgcgtagaacgaagaaaggtctagagccgattgatattgcagcgattccgctgaacgatgctaaaagctttgatatgttgcaacgcgctgaaacaacagcagtatttcagctggaatcccgtggtatgaaggatctgattaaacgtctgcgtcccgattgcttcgaagatatgatcgcgcttgtcgctttattccgtccaggtcccttgcagtcaggcatggtggataacttcattgaccgcaaacatggccgggaagagctctcatacccagatatacagtggcagcacgaatctctacagcctgtgttggagccaacttacggcatcatcctttatcaagaacaagtgatgcagattgctcaggtgctggcgggatatactctcggtggtgcagatatgctccgacgggcgatgggtaagaaaaagccggaggagatggctaagcagcgttctgtttttgaagacggtgcaaagaaactgggtattaatggcgaactggcaatgaaaatctttgacctggtagagaagtttgccggttatggatttaataaatctcactctgctgcgtatgccttggtttcttatcagactttatggctgaaagcgcattacccggctgaattcatggctgcggtaatgactgcggatatggataatacagaaaaagtcgttgggttgattgatgaatgctggcgcatggggctgaaaatcttaccacctgatattaatagtggtttgtatcatttccacgttaatgatgatggggagatcgtatatggaatcggcgcaattaaaggggtaggtgaagggccgattgaagcgatcatcgaagctcgtcagaaagatggttattttagagaactgtttgatttatgtgcccgtgttgacaccaagaagttaaatcgccgagtgatggaaaaactgatcatgtcaggggcatttgaccgtttagggccgcaccgtgcagcactgatgtcttcgttggaagatgcgctaaaagcggcagatcaacatgctaaagcagaagctactggtcagactgatatgtttggtgtattagctgaagcgccagaagaagtggaacgctcttatgccaatatttctcaatggccggaacagattgttcttgatggtgaacgggaaacgctaggtctctatttaactgggcatcctatcacccgttatttaaaagaaattgagcgttatactagtggattgcggttaaaagatgtgaatccaaccccacgcggtcaagtaacaactgtgataggtttggtgctggcatccaaagtgattataaccaaacgaggtaaccggattggtatttgtactttagatgatcgttcaggacgtctagaagttatgttattttccgatgccttggagaaatatcggcatttgctagaacaagaccggatattaatcgctacaggtcaggtcagctttgatgatttcaatggcggtcttaaaatgacagcccgtgaattaatggatattagtgaagcgcgtgaaaaatatgcgcgtgggcttgctatctcgctgtcagacaggcaaattgatgatcaattgttgagccgtcttcgtagtgcattggaaccacatcgttcgggaacgataccggttcatctttattaccagagggaagacgcccgcgcccgtttaagatttggcgcgacgtggagggtaacgccaacggataaccttctgacagatttgcgaactctgctgggtaatgagcaggtagaattagaatttgactaaaattaggaatgttatgagtctgaattttcttgaatttgaacagccgattgccgagctggaagcgaaaattgattcgctaaccgcagttagccgtcaaggtgaaaaattagatataaatctggatgaagaagtacaacgtttgcgggaaaaaagtctggaattgactcgcaaaatcttttcagatttaggtgcctggcaaattgctcagcttgctcgtcacccacgtcgtccttatacgttggactatattcagcatatttttactgattttgaagagcttgctggtgatcgtgcttatgctgatgacaaagcaattgtgggtggtctggctcgtattgatggacgtccagtgatggtgattggtcaccaaaaaggccgtgaaaccaaagaaaaaattcgccgtaatttcggtatgccagcgccagaaggttatcgtaaagctttgcgcctgatggaaatggcagagcgttttaaactgccaattattactttcattgatactcctggtgcatatcctggggttggtgcagaagaacgtggtcaatctgaggcgatagctcgcaacttgcgtgaaatgtcccgcctgtctgtgcctgttatttgtactgtgattggtgaaggtggctctggtggtgcattggcgattggtgttggtgataaagtgaatatgctgcaatatagtacttattctgttatctccccagaaggttgtgcctcaattttgtggaaaagcgcggaaaaagcacctttggcggcagaagctatggggatcactgctcctcgtttgaaagagttggagttggtcgatactgtgatttcagagccattaggtggtgctcatcgtgactatgaagcaatatccacgtcgttgaaagctcagttgttgattgacctggcagagcttgatcatttgacatctgaagaattagtcaaccgccgatatcagcgcttgatgcaatatggttattgctgatatttgaattaattgtttggataagggatggtaactgactggaaatgataaatttcagtcacttccatcctttactgtttctgcttctttttatcatttcatattgttaatgaaagtagtgaagaacattatctgactgacagaggttttaaacttactaaagtatataccctatggatttcaagatgcatcgcggcggcaagggagcgaatccccgggagcatagataactatgtgactggggtgagtgagtgcagccaacaaagaagcaacttgaaagataacgggtataataatgaattcatattattgcaagctaaggaactcttgaatctataatggcaaacattgatgagagactatttgtcaccttggctaaacagcttggtgaatataagaaaatcctggttggattcagtggtgggctagattcctctgttttgcttcatttattggttaattggcgtaatcaacataatcagaaaattcaactaagggcaatacatattcaccacggtttaaacctaaaagcagatcagtggattgaacattgtcagctgatctgtgatgactggcaagtggagtttcattctgcaagagtaacgatagatgctcgtcaaaaggggattgaggctgctgctcgtgatgctcgatatcaggtattcaagagcgaattacaaaaagatgaagttttggtaacagctcaacatcttgatgatcaggcggagacttttttactggcattaaagcgaggtagtggtccggcaggtcttgcttctatgccttcaatcgctgtatttgctgatacattattgttacgtccgttacttgactatagccggaatgaattggaaaagtatgccagtaaacatcgtctgaattggattgaagacgatagtaatcaagatgatcgttatgacagaaattttctgcgcttacatatcatgccgttactaaatcaacgttggtcgcatttccctaaagctgctgctcgtagtgcaagtttatgtggtgaacaagagcagcttctagatgagttactgaatgagtctttgaaagagttgataacccaagatggtgctttgggtattgtgtctttggctgtatgttcagaagctaaacgaaatgctttgttacgccgttggtttggttaccatgggatgaaaatgccttcacgagagcagcttaaccggctttggtatgaggtagctctggctcgtactgatgcggagcctcggctacaatttggtaaatatgatgtacgccgttataagcaaaaactctggttggttcctcagtggcaatctttgagagagactattcttgagtgggatatttgcaatactttggtattaccggatcgcttaggagaattgaatattgctgaccgcggtattcaagtaagggtcccggctgataatgaacgagtgactattcgctttggtgtccagggaatgataagtattgtggggcgtcaacactcccggcatagtaaaaaattgtggcaagagcttggggttgctccatggcttagagagcgaattccattgctttattacaacgaacaattgatagcggcgttaggtgtttttgtcaccaaggaaagtgaagcggcagaaggaaggaagatgttaacaatgaactggcataaaacgctgttaaaataaaaagttaagccgccaaaggcggctgttttctatcaagattcagagggttcaataataatagtgccaatcttagggtgactgaaactagcaatatgatctaaccgcaattcacaaggtttaccttctgtttcaatgatcaagtattcaactttttttcttaaaaccaaatcacaggcttttccttcaataacttccccaccccgcaactttatgtggaggtggagctgatgttggcaagttgactcaagattgtcgtagtcgtcacagttaattggttgatattcagtatttatagacatattcgctcaccactatggttagtggcggttattgccgcccgtggttgttaaaaattgtaactcaaaagcactattaatgactatagcacaggaaatcaatcgtgattaatgaataactttggttattcattctgaacagtaagtaaataaaagtcttatttcacagcaagttcctgacagaagtattaaaatcggcccacgttattttgctattattgagtaacatccttaagaaggacagtatttacgctattaagcttgaataatcgctatgttccttgtgttacttataagatgagaattataaagctcattatactgtgtggagataaatgtgaataaaaaacttttgacagcgttagttgctgtgggcgtatctgctttgatgggatgtaaaggtaactcagcacagcaaatgagttcacagccagtagatcagacttttcatggtgctcttccttgtgctgattgttctggtattgataccacactgttattggataatgacggtacttatattctggaacaaacttatattggcgctcgtgatggtgaccagtcgttctttgaatccggtctatgggcgaaagatggagagaaaattcgcctgacaaaatcagacgaccagaaatcttattatctgtcgaaaggtgaaaacctggtaatgctggatattgaaggcaataaaattgaatcatcattcaattatgaactgcaacgggtaaaaccgaagaaattggcgggtgaatacagttatatggctgatgctgctttgtttacagattgtagtacgggtaagcggtatgctgtaacggaaagtctggatttggagcaaggctatcaccaagtcggtgtggaaggtggaacgccggtttatgttgaagttgaaggctattacagcgtccgtccttcaatggaagatgggcaatttgatcctgccttgattcagacaggtaaaatccatttcgataaatcgaaatcttgtaatatgaagaaacaattctagcttcagtatgaatggtgataatgggctaagcagcgtaaaatgctctgttgcgatatgaccattatcaccacgttattcaataagttactgaataatcctaattaacaaccaagttgttgcttcaggtaatcaacaacattgtctagtttcagcatctgtttttcatcattgcgacgatgtttatattctacttcgccattatcaagattacggtcaccaataacgacagtgtgtggtacaccgataagctccatatcggcaaacatcacgcctgggcgttccttgcgatcatcaaaaataacatcaataccgctagcgcgtagatcggcatacagtttctctgcaacttctttaacacggtatgacttgtgcatattcattggcaaaatagcaacttggaatggtgcaattgcatcaggccagatgataccgcggtcatcgtgattttgttcaatcgctgcggcgacaatacgagtgacgccaataccataacagcccatagtgactatctgattgtggccgtcttcgccttgaaccgtcgctttcatggcatcagaatatttggtgccaagctggaagatatggcccacttcaataccacgtttgatgagcaatgtacctttaccatccgggctggcatcaccttcaacaacattacggatatcagcaacctctggtactggtagatcacgctcccagttaataccgaaatagtgtttgtcattgatattggcacctgcgccaaagtcactcatcactgccacactgcggtcaataatagcaggtattggcagattgacaggtcccaatgaacccgggcctgcaccaacaattgagcgaatctcttcttcggtagcgaaagtcagtgggctggcaactaaagataatttctctgccttgatttcattaagttcatggtcgccgcgaaccagtaaggcgatcaatttatgacttgttccttctgctgcgtgaaccatcagggttttaactgttttctcaattggtagattgaattgctcaaccagttcagcaattgtttttgcgtttggggtatctaccagatgcatatcttctgttggtactgcgcgatcatgagcgggggcaacagcttcggctaattcaatattggctgcgtagttggattcagtggagaagacgatatcatcttctccactggctgccagaacctgaaattcatgagaagcactaccaccgatggaaccggtatcagccagaacagcacgaaaatccaaacctatacgggtaaaaattttgctgtaggcttcgtacatgttgtcgtaagtttcttgtaatgatgtctgggtagcatggaaagagtaagcatctttcattaggaattcacgggagcgcatcacgccaaaacgagggcgaacttcatcgcgaaatttagtctggatctggaatagagtcagtggtaactgcttatatgagctgacttcattgcggatcagatcagtgatgacctcttcatgagttgggcctagtacaaaaggacgatcacctcggtcaacaaaacgcagtaactctggaccatattgttcccagcggccactttcttgccatagatctgccggttgtacgacgggcatagatatttcaatcgctccggtattgttcatctcttctcgaacaattttttcgacttttttgagtacacggatacctgtaggcatccaattgtacagacctgaagcgagcttacggatcatgcccgcacgcagcatcagcttatggctgacaacctccgcatcggcaggagtctcttttaatgtagagagcagatattggctagtacgcattgttaggttccattagagcagcaaattgcttctgactggcagaaatttgccagccaataaaaaaacgaaaataagtctttagtctaccagtgagtttaagatgccaaaagggtatatgctgatttttaatggggatctatggagactacttcggtcaatgtgccacagattttccagcgtacattaaaatccagtaaatgagcagcatattcccgattttcctgttctcttctccggtaagctggacgaggatcttgggctaaaacttgactgataaaacggcgtaaattcggataaatattttgaattgagattagctgttgctcagcggcaggcgaaaataccacttccatattggtagaaggagcttgctgcgcaaaacccgccattgcatgtggctgacattcagcgaaaggcagataaggcttaatatcgataaccggcgtaccatcaactaaatccaggctacccagttccagaataactcgacctttcctgtattcgattcctttaagttcaatcagagacatgccaattggattaggccgaaaagtcgaacgggttgcgaatacgcccatttttgcattgccacctaaacgaggaggacgcaccattggcttccagccgccttctattgtttgatggaagatgaaaataacccacagatgactaaattgttccagaccacgaactgcatccggttgattatagggaggaagaagtaccagtttcccaccaccatcttcaataagaccgggttggcggggaacggcaaatttttctttataaggggagtggataacccctatctgcgtgaaatggaaatcggtcattgggtgataagcaaggctgaaccttcacatattgctatctggtagcatccttggcctgataatatttcgcattgatgcaataaaacagcgttagcattcaaataagctgctttggtcatcatctggttgcgagccacgatgatatttgcgggtggatcctgtaaggaactacgacacgattgaccagaaacaatccctaaatctttaaatgagacacctaataattcttcacttttggtatataactttacggatgaagagaaatgttttttttctccggttgatagttttgtgtacttcatatctgataactgggaagcgtcaggaaatgttgcttgttgtactgaacatcctgttatggacagtgctaataaagaggcaagtagcctacgcatgatagatcctcgaatttttactgttagagttaagcgagtcgatcaggttaacaaaaaataccgaaaacatgatgccataataaatcaggcggacaatctgtccgcctgattattctaatatcgatgaacgtaatatgaaagattaccaacctttcactgcaccaccattaaagatcttattggcagcttcatcaacttcgtctgattgatatgccttaacgaatttcttaacgttttcagcatctttattatcttctcgactaaccagtaggtttacatatggagaatttttatcttcaacaaataaaccatcttttgctggagtcagaccaatctggcttgcataggttgtattaatgatggcgagagcaattttttgatcatccagtgaacgtggcaattgtggtgcttccaattcgactagttttaaattcttaggattttcaacaacgtctagaaccgttggtaataagcctatgccatctttcaatttaattaaaccttgtttctgtaacagtaataaagaacggcctaagttcgttggatcgtttggtaacgcaatttgggaaccatcctgcaattcatccaaggacttaatttttttggaataacccgcaattggataaacaaaagagttgccaacggtgaccatcttataaccacgatctttgatttgctgatccatatagggtttgtgctggtatgcattcagatcaatatcgcctttgctcagagcttcgtttggcaatacaaaatcattaaaggttaccagttctacatcaagaccatatttatctttagcgactttttttgcaatttcagccacttcctgctctgcaccaacgataacgcctactttaatatggtttggatcttgtttttcctgcccgcagccagacagaattaatgaacctaaaagagcgctgatagttgcgatggtttttaatttaacagacatactttacccctatagaatactgatttattagcaccgacacaggtactgctattaaaataatcttgttatttacgtgttgtggccttgactaaatggtcaccacttaattgaattaaataaactaaaataaccagtaacactaatacggtattcattactgttgcattatagccgatatatccgtattggtaaccaatctggcctaatccgcctgcacctaccgcacctcccattgcagaataaccgactaaagttatgagggtaattgtggctgcattgagcaaaccaggtaatgcttcaggtaacagaattttctttataatctggaatggggatgctcccattgctctagcagcttcaatgagtcccgatggaatttctaataaagcattttccaccatacgagcaataaatggtgcagcacctatggttaatgggacaatggcagcttgtaaaccgatcgatgttcccacaattagtctggtaaaaggaatcatccacaccagtaaaataataaatgggatagaacggaaaatattaactaccgctgaaagaaaacgatagagtttactattttccataatttgattgggacgggtgacatataacaatacacctatcggcagcccgataatgaagccaaagaaaccagaaacaaaagtcattactagagtttcccagacgcctttagccagtaataacatcattccttcagacataaccgagaacctctactttcacatgatgatcttgtaaaaacttaatcgttgactcaacgccaccattttcaccgtgtaattcagctaacatcacaccaaattttacgccaccggcatagtcgatttgagaacttaatatattcatatcaatattaaaacgacgtactgccattgaaatcagtggagcatctacagactgaccggtgaactctaatttcaataatggactaagatttggtgctgggtggctttgcattttttgtacataatcttcagggatatccagatgcaaagttgactgaataaatgcctgagcgataggtgtcttgggatgagagaatacttcactaacaatgtcttgttcaatcagttgcccgccactgataacggctacttggtcacaaatacgtttgacgacatccatttcatgtgtaattaacagaatagttagccccaaacggcgattaatatctttcaataattctagaatagaacgagttgttgcaggatctagagcgctggttgcttcatcacataaaagtactttaggtgaattagctagagcacgggcaatagcaacacgttgcttctgtccgccagagagatttgctggataggcatcatgcttatctgtaagaccaacaagctccaatagctcatctacccgttttttgatttcggcttttggaatgttatccaattccaaaggcaaagctatgttgccgaacactgttcttgaagagagcaaattgaagtgttggaaaatcatgccgatacgacgacgtgcacgagttaaatcactatcagacaagatagttaaatcctgaccattaaccaatacttgcccggaagttgggcgctcaagcatatttacacagcgaattagtgtacttttacctgcgccggatgagccaataacaccgtaaatttgcccttgcggaacatgcaggctgatatctgaaagcgcgttaatagaacgggcaccctgctggaatattttattgatatgaaacagttttatcatttttattcttatttatttttataaaaattttgaaaattgatagcttgaacatttttgaaaaagcaaaccacccgtttaatcggatgttaaggtgtctagacgtctaagtcaactgtgaataaattaattgctgcattctcattcatggctaaatcatgcgatactgggggcttcttacatttttggagcaatcgggtgacacaaggtattcctgccgtatttttggatcgtgacggaacaataaatatcgatcatggttatgtacatgaaatagatgattttcaatttatcgatggtgtcattgaagccatgattgaattgaaaaagatggggtatgcactggtattagtcacaaaccagtcaggtattgcccgtggaattttcgatgaagagcagtttttgcaactgacggaatggatggattggtcgctagcagaccgtggtgtggatttggatggcatttattattgccctcatcacccagatgcaactgaagagcaatataagaagagttgtgactgccgtaaaccgcagccgggtatgttactggatgcgcagagggagctgagtatcgatatgacggcttcttttatgattggtgacaaactcgaagatatgcaagccgcgacgttggcaaaaattggcactaaagtattagttcgcacaggtaaacccgttaacactgaagctgaacaagcggctaatttgataataaatagtcttgcagacttacctaaagcaattaaaggcatcaaaaaataggctttttgttctttatatcatcattttgttgaaaaaatcctcgaataaaagtttttttcaaataaatgcttgccagcgtcaaagaacgccctataatgcgccaccactgaccgacacaacgctgataaacattgtgaggtcgggcagagaaagcgataatcagtgcttgactctgcgggcgaacagcgtaatatacgcagcccggctgaacgagaatgttattttttatgtcagcctgctctttaacaattaatcagacaatctgtgtgggcactcacgagaccgtatcacaaaaaaatacgttttaaagtcttgaagagtgaacaacagttaattcattacgaaataattagtcagaattctttgagcatcaaactttgatttaaattgaagagtttgatcatggctcagattgaacgctggcggcaggcctaacacatgcaagtcgggcggtaacaggaaagtgcctgcacttttgctgacgagcggcggacgggtgagtaatgtctggggatctgcccgagggcgggggataaccactggaaacggtggctaataccgcataatgtcgcgagaccaaagtgggggacctgaaagggcctcacgccgtcggatgaacccagatgggattagctggtaggtagggtaatggcctacctaggcgacgatctctagctggtctgagaggatgaccagccacactgggactgagacacggcccagactcctacgggaggcagcagtggggaatattgcacaatgggcgcaagcctgatgcagccatgccgcgtgtatgaagaaggccttcgggttgtaaagtactttcagcggggaggaagggtttagcctgaagagggttagattttgacgttacccgcagaagaagcaccggctaactccgtgccagcagccgcggtaatacggagggtgcaagcgttaatcggaatgactgggcgtaaagcgcacgcaggcggtcaattaagttagatgtgaaatccccgggctcaacctgggaatggcatctaagactggttgactggagtctcgtagaggggggtagaattccatgtgtagcggtgaaatgcgtagagatgtggaggaataccggtggcgaaggcggccccctggacgaagactgacgctcaggtgcgaaagcgtggggagcaaacaggattagataccctggtagtccacgctgtaaacgatgtcgatttggaggttgcggtcttgaacggtggcttccgaagctaacgcgttaaatcgaccgcctggggagtacggccgcaaggttaaaactcaaatgaattgacgggggcccgcacaagcggtggagcatgtggtttaattcgatgcaacgcgaagaaccttacctactcttgacatcctcagaatttgctggagacagcgaagtgccttagggaactgagagacaggtgctgcatggctgtcgtcagctcgtgttgtgaaatgttgggttaagtcccgcaacgagcgcaacccttatcctttgttgccagcacgtgaaggtgggaactcaaaggagactgccggtgataaaccggaggaaggtggggatgacgtcaagtcatcatggcccttacgagtagggctacacacgtgctacaatggcggatacaaagtgaagcgacctcgcgagagcaagcggaacacacaaagtctgtcgtagtccggattggagtctgcaactcgactccatgaagtcggaatcgctagtaatcgtagatcagcatgctacggtgaatacgttcccgggccttgtacacaccgcccgtcacaccatgggagtgggttgcaaaagaagtcggtagcttaaccgaaaggggggcgctgaccactttgtggctcatgactggggtgaagtcgtaacaaggtaaccgtaggggaacctgcggttggatcacctccttacctgagataggttgagtgcagtgctcacacagattgtctgatgaaagaagagaataacgttatcgtgataggcttgtagctcaggtggttagagcgcacccctgataagggtgaggtcggtggttcaagtccactcaggcctaccaaacgcttttcctctttgccattttcgaacgctgcattactcatgtgctcgcgcacactgcgtgattcgcgttgaaactggctgcgatgaaaaggtttgaagaaaactctgcgatagcggtctatttctgtatggggctatagctcagctgggagagcgcctgccttgcacgcaggaggtcagcggttcgatcccgcttagctccaccatactcaacctaattcagagtatattggcgacagtatgctgcgaattattttgctctttaacaatctggaacaagctgaaaaattgaaatgctcaataatatcgccgaggtattattgaggtatctctcaagctgaacaatccgagactctttcgggttgtgaggttaagcgaataagcgtacacggtggatgcctaggcagtcagaggcgatgaaggacgtgctaatctgcgaaaagcgtcggtaagctgatatgaagcgacagagccggcgatgtccgaatggggaaacccagtgcaatgcgttgcactatcattaactgaattcataggttaatgaggcgaaccgggggaactgaaacatctcagtaccccgaggaaaagaaatcaaccgagattcccccagtagcggcgagcgaacggggaggagcccagaacctgcatcagcgatagcatcagaggaacggtctggaaaggccggcgagagagggtgacagccccgtactcgaagatggtatggctgtgagttcgatgagtaaggcgggacacgagaaatcctgtctgaagatggggggaccatcctccaaggctaaatactcctgactgaccgatagtgaaccagtaccgtgagggaaaggcgaaaagaaccccggcgaggggagtgaaagagaacctgaaaccgtgtacgtacaagcagtgggagccccaccaccaaagcgtttcactttgcgtggtgcacaaaatgcgtaacagcagcactgatgacggttggcggagcggcagcgacgcccaacacaccaatcaagcagtggagcgttttggggtggggtgactgcgtaccttttgtataatgggtcagcgacttatattctgtagcaaggttaaccggataggggagccgcagggaaaccgagtcttaactgggcgaaagagttgcagggtatagacccgaaacccggtgagctagccatgggcaggttgaaggttgggtaacactaactggaggaccgaaccgactaatgttgaaaaattagcggatgacctgtggctgggggtgaaaggccaatcaaaccgggagatagctggttctccccgaaagctatttaggtagcgcctcgtgaattcatcttcgggggtagagcactgtttcggctagggggccatcccggcttaccaacccgatgcaaactgcgaataccgaagaatggtatcacgggagacacacggcgggtgctaacgtccgtcgtgaagagggaaacaacccagaccgccagctaaggtcccgaagtcatggttaagtgggaaacgatgtgggaaggcccagacagccaggatgttggcttagaagcagccatcattgaaagaaagcgtaatagctcactggtcgagtcggcctgcgcggaagatgtaacggggctaaaccatgcaccgaagctgcggcagtgacacgcaagtgttattgggtaggggagcgttctgtaagccggagaaggtggcgctgtgaggcctgctggaggtatcagaagtgcgaatgctgacataagtaacgataaagcgggtgaaaaacccgctcgccggaagaccaagggttcctgtccaacgttaatcggggcagggtgagtcgacccctaaggtgaggccgagaggcgtagctgatgggaaacaggttaatattcctgtactgaatgtgactgcgaaggggggacggagaaggctaggccatccgggcgacggttgtcccggtttaagcgtgtaggtgggaggagcaggcaaatccgctcttctgtgaacactgaggcgtgatgacgagctgctacggcggtgaagtggttgatgcccggcttccaggaaaagcctctaagcaccaggtcatattgaatcgtaccccaaaccgacacaggtggtcaggtagagaatactcaggcgcttgagagaactcgggtgaaggaactaggcaaaatggtgccgtaacttcgggagaaggcacgctggcggtaggtgaaggagtttgcctccggagctgaagccagtcgcagagaccagctggctgcaactgtttattaaaaacacagcactgtgcaaacacgtaagtggacgtatacggtgtgacgcctgcccggtgctggaaggttaattgatggggttagccgcaaggcgaggctcttgacagaagccccagtaaacggcggccgtaactataacggtcctaaggtagcgaaattccttgtcgggtaagttccgacctgcacgaatggcgtaatgatggccaggctgtctccacccgagactcagtgaaattgaactcgctgtgaagatgcagtgtccccgcggcaagacggaaagaccccgtgaacctttactatagcttgacactgaacatggagccttgatgtgtaggataggtgggaggctgagaagtgcggacgccagtctgcatggagccatccttgaaataccacccttgaatgttcgatgttctcacctgggcccgtaaaccgggccggggacagtgtctggcgggtagtttgactggggcggtctcctcccaaagggtaacggaggagcacgaaggttggctaatcacggtcggacatcgtgaggttagtgcaaaggcataagccagcttaactgcgagagtgacggttcgagcaggtacgaaagtaggtcttagtgatccggtggttctgaatggaagggccatcgctcaacggataaaaggtactccggggataacaggctgataccgcccaagagttcatatcgacggcggtgtttggcacctcgatgtcggctcatcacatcctggggctgaagtaggtcccaagggtatggctgttcgccatttaaagtggtacgcgagctgggtttagaacgtcgtgagacagttcggtccctatctgccgtgggcgcaggaagattgaaaggggctgctcctagtacgagaggaccggagtggacgcaccgctggtgtacgggttgtcatgccaatggcatagcccggtagctaagtgcgggagagataaccgctgaaagcatctaagcgggaaacttgccttgagatgagtcttcccctgactgaggtcacggaaggaacgtttaagacgaagacgtggataggctgggtgtgtaagtgcagcgatgcattgagctgaccagtactaatgaaccgagaggcttaaccttacaacaccgaaggtgttttggtgtcggaagacagcagagagagatttttcgcttgttcagagattgattcgggtggttgtggcagaagagcgacaacggccggaagaaaaccgaatatgcctggcggcgatagcgcggtggtcccacctgaccccatgccgaactcagcagtgaaacgccgtagcgccgatggtagtgtggggtctccccatgtgagagtaggacactgccaggctttaattttgcgttgtatggcgatagaaaagcaatacaaggccccagtggtagcgagtagggtaactccgtcgggaacggatttgaacgtcgcgaggggcgacggcccgaagagcaaacggcaggaaagccgtttgtaagctgccaagcttgatatttaagttttatgtcgtaacagcgatataaatcaaagagaattcggtggtgcggtagttcagttggttagaataccggcctgtcacgccgggggtcgcgggttcgagccccgtccgcaccgccaccttaatttgcagagaaaaccctgagagaaatttcagggttttttgctgtttatgagtattaaaatcaataattaccttattatatttgatagaatcggatagtttttatagttattttgtacttaagaggttttttacgtggtaaaaaaaacctatgcgataagatatgttgctggacaacctgttgaacgtgtctttcctatgtcgactcatcagcttgggaatacattacctgtaggtactcctttgatcactggtacaaatgagcttagggttgttgtatggaatatctataaacagcagcgtccttcatggcgaaaggttctgaaagagctgactaacgaaagccagttgattttattacaagaagcgcagacaactcctgatttagttgaatttgctacctcaaattacctaatatctgatcaagttcccgcatttctattaccacaacacccctctggtgtaatgacgttagcaacttctcatcctgtctattgttgcccattgagagagaaagagcctcttttacgtttatctaagtccgctctcatcactgtttatcttttacaagataatcgtcagttaatggttattaatgtgcatgcgataaatttcagttttggtgtggatgtgtatagccgccagttgaataatattggtgttcatgttcgtttacataatggcccagtcattatggctggtgattttaatgcatggagtaagcaacgattaaatgctttaaaacgttttaccagatatttacaccttgaagaagtatcttttactgatgactatcgaacaatcgcatttggtagacctttagattttattttttaccgagagttgaatatcgctaatgctattgtgatacctactgatgcctccgatcataatcctcttgttgtgaatttttattaactctttattataagaatatatccatctattttttatgaattaaattcttatttaattcattgaaaaaacattatatcattattactttattgtaactgtttattatctgttttgatgggtttatattttaaaaataaaatttatttctattaaaataatatataaattattttaattaatatgtgtaagttatattgagataaatattaaatatatttcatttgggtaaattaaaataaatgccagattaatctggcattttttatgaatgaaaattatttatttatctgatggatttgagaaatatttttctttttgctaaagaagtaggtgattgataataagattacccatgtgattcccacaattaatgcaatgcgggttttctcgaaatagcccagtaatacaataacaaataccataaagataatggttaatgctggcgctattggccacataggtacggggaatttcaaggtcttaacttcttctttgctcattttgcggcgcatagcaacctgagaaagtaggatcattaaccatacccatacagtagcaaatgtcgcgatagaggcaatgataacgaaaatttcttccggaatcatatagttgagtataacgccaattaagagaactgctgacataacgattacagtcatccagggtacgccattacggctcagcttggtgaatgatttaggcgcttgtccttcttgggccatgccgtacatcatacgaccagcaccaaaaatatcgctattgattgctgaaattgcggcagtaatcactacaatattgagaatgttggcagcagaattgatacccaagctagaaaaaatctgtacgaatgggctaccttcttgaccgatctgattccacggataaatacacattaaaataaacagagtcagtacatagaacagcagaatacggaaagggacagcgttgattgcttttggaattgttttctcggggtttttggtctcactggcagtaataccaatgacttcaataccaccaaaagcaaacatcacaatagcgagtgacgctatcacaccactgatgccattaggcataaaaccgccatattcccacaaactggcaatgccggttgcatgatctgtttcttggccgaatccatagatcatgataatcatgccaccgataatcatagcgataattgcggtgactttcacaatcgaaagccagaattccatttcaccgaaaatcttcacatgacaaagattaattgcgccaataaagcagacaatgcttagtacccagatccattgctccacatgggggaaccagagcttcatataaaaaccaaatgcagtaacgtcagccaggcagacgatcagcatttcgaatatataattccatccggttagaaatccggctaaaggtccgaggtaatggctggcatagtgtgaaaaagaaccggctactggatggtgaacagccatttcacctaatgcacgcatcaccataaatacggcagcaccgccgattaaataggcgagtaatacggcgggtccagcttgctgaatagcagctgcggagccatagaacagccctgtgcctattgcggagcctaatgccataaagcggatgtgccgcccggttagaccccgtttcagctgagtttcattattctgcattatttattcctgtcactttctcagtgctagatatattttaagcacacaatgcctcgacaagtcgcatgttagctaagcgaagcaaaccccgtaccttatcataaagattgatgttcgagggatagatatctgcaataatgcgcccttgcctaatgaaaccagagatttgtatgttttacccgattaacgaaatattccagacattgcagggagaaggtttttttaccggcgtcccggcaatttttattcgtctacaagggtgtccggttggttgtagctggtgtgatactaaacacacttgggagaaagaagtggaaaagcaacggacattggaaacaattttgctgaagacgagtgaaagcaatgaatggagtaaagcttctcctaagcaaattacagcgctgtttgttcaacagaaatataccgcacgccacgttgttattactggtggtgagccttgtctctatgatcttattcctctgaccgaagagttagaaagtcttggctaccaatgccagatagaaaccagtggtacgtatcatgttaaatgttctgctgctacttgggtgacggtttcaccaaaagttaacatgcgtggtggttaccggatattgcagcaggctttgcagagagctaatgaaataaaatatccagttgcgagggaaagggatattgaagcattggatgagttattagcgacattaaatgacaactcatcacgtattattgcattgcaaccgattagccagaaagaagaagctacccgtttatgtattgaaacctgtattgcccgtaattggcgattttctatgcaaacacataaatatttgaatatcgcctgagaaaagcttactgcactggaggtttcctggtgcagtaagttgtttcatttgccgcggaaaatacatcccgcagtacaggtttccttcaccataacggcactgagttgtggaactattggtttaactttatgccaaatccaggttgccaatacttcgctggttggattttccagtccagggatatcgttcaggtaatggtgatctagctgttcccaaacaggcttgaatagggcttttaaatcggcaaagtccataatccagccactatgaggatcgacctccccggtaatttccagtcgtactataaatgagtgtccatgcaggcgaccgcatttatggccttctgggacatgtggcagacggtgggcagcttcaaactgaaaatctttaaaaatcgttgtgctcatagtggttctccctgacttcaaaaaacccgctattctacccgatcttctgaattaaacctggttttttcatttttttgctattgctcttattaactgttttatagatatattaaatctgtaaatatggttaggcgttttggttatttgatattgcgatagtttctttaaatagtcacaagtcgctgagataaccttacaaaccatccctatttattttttctactaaaaataacggacattggtaatcgtaaagggcagcacaggacatgagcataaaaccaccttcaatttcacttcttccggtttcacctgaacagctagtgcgtttgcaatcggagattggggatttttcaccaactcaattagcctggttgtctggttatttttggggaatggtgaatcaacaaccacaggttcaggctgtggttccggcggttccggcacaggagacgattacattaatttcagcttcacaaaccggtaatgctcgtcgtttagctgagcagctccgtgaggatttgttggcacagaaactcaatgtcaatctattcaatgccggtgattataaattcaaacaaattgctcaagaaaagatactgataattattgcttctacccaaggtgaaggagaacctgctgaggaagcggttgcattgtataaatatctctattctaaaaaggtgccgaagctgaatgatacggtatttgcggtttttggtctgggtgatacctcttatgagcgattttgccaggctggaaaagatttcgataatcgtctgaatgaattaggcgctcaacggcttctggagcgtgtagatggtgatgtcgaatatcagcaggttgcggatcagtggcgtaaacaattaactggaatcctgaaacagcgtattccaactgagacaggaactgagattacttctgcacaggacagatcggtaaatgaagttttttcaacttcttatactaaacaggcaccattgactgcggctttagctacttgccagaaaataacgggtcgtggttctgataaagatgttcgccatattgaaattgatctgggtgattcaggtttgcgttatcagccaggtgatgctttgggtgtttggtttgaaaatgatccggagctggtggatgaagtgttgaatttgctctggttgcagggaacagaacaagttgaggttaatggtcagaaattgtcattgagagaagcgctgatcagccatgttgagctaacccaaaataccagtgtgattgtggaaaaatacgccgttctcgcgaaagatgaaaaattactttctttgattgctgataaacaagcattacaacaatacgctcacaacaagccgattgccgatatgataagggaagcggcttctcaaccagaggcgcagcaatttattgatttgctacggcctttgacaccaagactttattcaatttcttcttctcaggcagaaatggaaaatgaagttcatcttacagttggtgtggttcgttatgaaattgacggacgggcccgcactggcggtgcatccggctatctggcagatcgcttacaggaaaatagtgatattcgtatttttattgagcataacgataattttcgtctgcctgccgatccacgcacgcctgtcatcatgattgggccgggaaccggaattgcaccatttcgggcatttatgcagcaaagggaagctgatggcgctgaagggaaaaattggctgttctttggtaatccacattttactgaagattttctctatcaagtggagtggcagcgttatgtcaaagatggcctgttaacccgtattgatctggcatggtcccgtgatcagcagcataaaatttatgtccaagacaaactgcgtgagcagggtgaagcggtatggtgctggattaaggaaggtgcacatctgtatgtgtgtggtgatgcaaaccgcatggcaaaagatgtggaacatgcgttattggatattattgctgagcatggcggcatggataccgaacaggcagatgaattcttaagtgaactgcgctttgagcgccgttatcagagggatgtgtactaatgaacgataaacaacatggtccttttattgtcgaaggtaaactggctgacagtgagcgtatgaagcaggagagtaattttctgcgaggtacgattagtgaagatttaactaatggcttgacgggaggttttgaaggggacaatttcctgttgattcgttttcatggcatgtatcagcaggatgatcgtgatatccgtgctgaacgcgctgagcaaaaactggagccacgtcatgcaataatgttgcgctgccgtctgccgggtggcgtgattacgccacagcaatggttgggcattgataagtttgctgaagagaataccctttatggcagtatccggttgactaaccgccagacatttcaatttcatggcattttaaaagggaaagtaaaacttgcgcatcaattgctgaatcaagttgggctggattcgctcgcgacggcgaatgacgttaatcgcaatgtgctttgtacctcgaatcctattcaatcagagctacatcagcaagcttacgaatgggcgaagaaaatctcagaacatttactgccacgtacccgtgcttatgctgaactctggttggataaagaaaaagtcgcaacgaccgatgaagagccgattcttggctcgacttatttgccgcgtaaattcaaaaccacggtagttattcctccacagaatgatgttgatctgcatgccaacgatctgaattttattgctattgcagaaggtagcaagttggttggttttaacgtgttggtgggtggtggtttggcgatgactcacggtgataaaaatacctatccaagtatggcgagtgagtttggttatatcccgcttgagcatacgttggcaattgcggaagctgtggtgacaactcagcgtgattggggtaaccggactgagcgtaaaaatgccaaaaccaaatatacgttggagcgggttggtgttgagacttttaaagcagaggtagagagacgcgctggcgtgaaatttgaggcaatccgaccttatgaatttactggtcgtggtgatcaaattggctggctgaaaggtatcgatgataaatggcatttgacactgtttattgagaatggtcgccttttggactaccccggcaagccgctgaaaagcggtgttgctgaaattgccaaaatacataaaggggattttcgcctgacggccaatcagaacttaatcattgctggtattcctgaaagtgagaaacaacgcattgaaactatcgcctgtcggcatggattgattgacgataaaaccacagttcagcgtaaaaactcaatggcctgtgtctctttcccaacttgcccattggcaatggctgaggctgaacgttttttaccggagtttgtcactcatgttgaacaattgatgaataaacacggtattggtgatgaacatattgttttgcgggtgacgggttgtccgaatggttgtgctagagcgatgttggcggaggtagggctagttggcaaagcgcttgatcgttataaccttcatcttggtggtaatcggattggtacccgtattccacgcatgtataaagaaaatatcagctcacaagcgattttatccatcatggatgaacttattgggcgttgggcgacaggtcggcagccaaatgaaggttttggtgatttcctgatccgcacggatattatcaagccggtactggattcagcccgcgatttttacgattggcaggaggcggtatgagccaattcagcttatctcaatgtgttagtatgactgctgaacaacaagagcaatcactggctgagattaatcttcggcttgaaatgatggatgctcaccagagagtaaactgggcattggaaaatttgccaggggagtttgttctttcctccagttttggtattcaggcggcggtatgtcttcatttagtgacacaagaatatcctgatattccggtcatacttactgataccggttatctattccctgaaacttatcaattcatagataaactcacaacgcaactgaaactgaatttgcaagtattcagtgctgagcattccccggcctggcaggaagctcgctatgggaaattgtgggagcaaggcgtagagggaatagagcgttacaatcagattaataaggttgaaccaatgaatcgggctttgaaaaatctgagagcacaaagttggtttgctggtttacgccgtcagcaatctgaaagtcgatcaaaattaccggttttagctgtacagcggggagtatttaagattttgccgattatcgactgggataaccggcgtgtgcatcaatatctgacaaaacatggcttggaatatcatccattatgggaacagggttatctctctgttggtgacatccatacaactcaaaaatgggaaccgggcatgagtgaagaacaaacccgtttttttggcttgaagcgagaatgtgggttacatgagaattaaaaaaccggtatttcctgagtgggattgatgataaagccctcgctttgttttaaggcgagggtgatgattaatataaatagtctgaaagacaatttagtcggatttttacgcgtgtttcattcgttcatttaaagtttcaatgatgaacgcattcaccgaaatctgatgctcggctgctgcgcaatgcaatcgctctccaaatgattcggggtagcgcagagtaaatgttttgattttttcttgccttgcataaggttcaatacctgatgcgttacaatcttcaagatattcatgtagagatattttaccctcatcttgcaacccctgaatactatcagagataaaatcacaataaccagacagccctaaaaatttacccctgaacatgccaatttctggcacgtagctaataatagcctgctgtccggctattaccattgtattttgtactgtcatcttcatggctcaactcctatgctttctaaccattctcgtaggctgacgacggcccctttgtcagtatctggtgagggatgtggacggtgaaatctggcaatactatcgtttagcaacagcctgcaacgtgaacctttcccctctttaacctcacctcccagagcgattatgagtgattccacgtcagaccacttaattcccgcaggaacaggcattttaaatatctgctccaacgtatttttttgcctcttcctgagcattgaaacctgttctttcatttctcgtattgctttctgtgaagtcagattatgaagttatattgaactcaatgacatatgaagtcaaattttgaagtcatttacttttcctgcccttagcgatgtagtgcaaaaaaacacactagccctgttctagagaggttggctatattccattacagaacatcaaattcttttttgtcattttataactttaccgctgactcatatattcattcgaaacagtttcagtacttataaatatttcactggatatcaagggcaattgtggattacttaccgatatttgttgagctgaaagggcggcttgtattacttgtcggtggtggagaggtggccgcacgtaaggcgactctactactacgggcaggtgcattattacaggttgtcgcgcctgaattgtgctctgaattacaacagcgttatcaagctggtgagttggaatggtatcagggagagttccaacctgaatatcttgatggcatctttttagttattgctgcgactgatgatcgtattctaaatcatcaggttttttctgaagctgataagcgcagtattttggtcaatgtcgttgatgatcaagttcattgctcatttatttttccatcaattattgaccgttctccggttttggtggcgatctcatcagcgggaaaagcgccggtattagcgcgtttaatccgggagaaactggaggcattactaccttccagtcttggtacgatggcaaaaatcgccgggaagtggcgtgagcgagtaaaacagcgattaacttccatgcgccagcgtcgttctttttgggaacaggctttcaatggtcgtttcgctatgttggttgcaaacggtcaaatccagcaggcggaaaaacagcttgagcaacaactagaacagtctgatttgcagggagaactggctctggttggggctggtcctggtgatccgggattactgacgctaaagggattgcaggttattcagcaggctgatgtggtgctttatgatcatctggtcagcagtgatgtactggatttgattcgccgtgatgcagataaaatttgcgttggcaaaagagcgggtaatcactctgtttctcaggaggagactaaccgattgatagtgaaatttgccagacaggggaaaaaagtcgttcgtcttaaaggcggtgatccctttatttttggccgtggtggtgaggaattacaggttgcagcatcagcaggcattccttttcaggttgtaccgggaattactgccgccatcggagcgacggcttacgcgggtattcctttgactcacagggaacactcacagagtatcacttttattacaggtcattgccgagaaaaggggaatgagctggattggccggctttagccagaggtcatcagactctggtgatttatatggggacggtcaaagccgccttgataagtcatcaattaattttacatgggcgagcggaagatacaccggtagccgtcattggttgtggtactcgtttagagcagcaagtgttaaccggcactttgcttgaactggaacagttagcacagcaggccccgtcgccggccttactagtggtgggagaggtggctcaacttcaccatcagatagcttggtttgggcagcaatctattgccaagataagccgtccggcagtagtcgattttgcataaggagttgtaatggatgagaaaagattgacacacttgcagcaacttgaagctgaaagtattcatattatacgggaagtggccgccgagtttgaaaacccggtgatgctttactctatcggtaaagattcttcggtcatgcttcatcttgcacgcaaggcgttctatccgggaacattgccatttcctttgctgcatgtggacacgggatggaaatttcgtgaaatgtacgaatttcgtgatcgtactgcgaagaattacggctttgaactgttggtgcatcgtaacctgcaaggggaagcaatgggaattaatccatttgtgcatggtagtgccaaacatactgacatcatgaaaacggaagggttaaagcaggcactggataaatatggttttgatgctgctttcggcggcgctcgtcgtgatgaggagaaatcgcgggctaaggagcggatctattctttccgagatcgctcacatcgttgggaccctaaaaaccagcgtcctgaattgtggcgcaattacaacggccagattaacaaaggtgaaagtattcgcgtattcccattgtctaattggactgaattggatgtctggcaatatatctatttggagcaaattgatattgttcctctttattttgccaaattacgtccggtattggagcgtgaggggacgctgattatggttgatgacaatcggatcgatctgaaaccgggcgaggttatcagccagcgcaaagttcgtttccgtactctcggttgttggccgctgacgggtgcagtgaaatctgatgctgaaacattgccggaaattattgaagagatgctgatatcgacgacaagtgaacggcaagggcggctgattgatagtgatcaatctgcttctatggaactgaaaaaacgtcaaggttatttctaaggagaacaaccatgtcagcgcttgcacagaatgaaaccattgctcatcaaattaaacaacagggcggtgtggaagcttatctgcacgctcaacaagagaaaggattactgcgtttcctgacgtgtggcagcgtggatgatggcaaaagtactctgattggacgcttgttacatgatacccgtcagatctacgaagatcagctttcaacattgcagaatgacagtaaacgtatcggtacccagggtgaaaaattagatctggctttattggtggatggtcttgctgcggagcgcgagcagggtatcaccattgatgtggcttatcgctatttttccacagaaaaacgtaaatttatcattgctgatacgccgggacatgagcagtacacccgtaatatggcaacgggggcatcgacctgtgatctctctattctgttgattgatgcgcgtaaaggtgttcaggagcagacccgtcgtcacagttttatcagtacattgttaggtattcgccatttggtggtcgcggtgaataaaatggatctgatggaatatcgtcaggaggtttttaatcagatcaaacaggattatatgaatttcgctggccaattgccgacaaatttggacgttcattttgtcccaatctcggcacttgatggcgataatatcgtcactataagtcgtaatatggattggtatgaagggccaacgttgttggatatccttgaaacagttgatgtaaagaaggaagcctcgaagcagttactgcgtttcccggtacagtatgttagccggcctgatctcgattttcgtggttacagtggcacactttcatctgggattttacgtaaagggcagaaagttaaagtcatgccatcgggtatctgctcacaggtggagcggattgtgacttttgatggtgatttggattttgctgttccgggtgaagccattacggtggtgctgaaagacgaaattgatatcagtcgaggtgatctgctgatttctgccgatgatgagatgatggttacccggcatgcactggtggatgtggtatggatgtctgaacagcctttggtgcaggggcagaaccttgatattaaagtggcgggtaaaaagagccgtgggaaagttgagaacattcaatatcaagtggatattactcacctgacacaacgggtggctgttgatttaccattaaatgccatcggatcggtggaattttcttttgaagagccattaatgctcgatagctatcagcaaaatagcgacactggcggcattatcttggtcgatcgactgactaatgtcactgttggtgcagggttggtacgtgaaattcagacagacgtttatgaagggccaaaagaattcagcgaatttgaactggaattgaatcggttgattcgtcgtcatttccctcattggggagccagagatttactgggaggtaaataaattggctgacattgaaaatctgccattagaaaatgttgtctggcatccacatcaactgaccagagcgcagcgggaggttgaaaatggacatcctgcattggttatttggttcactggtttatcgggttcagggaaatccactgtggctggggccttagagcaggccctgtttcaacggggaataaaaacttatttgcttgatggcgataacttgcgtcacggcctttgtcgtgatttgggtttttccgaacaggataggcaggaaaatatccgccgtgtgggtgaagttgccagtttgatggtcgatgcgggtttagtcgtgctgacggcttttatctccccttataaagcagagcggaaaaaggttcgtgaactgttggaaccggggcaatttattgaagtttttgtcgatacaccactggaaatttgtgaatcccgtgatccgaaaggattgtacaaaaaagcccgtgctggtgaaattcgtcatttcacggggattgattcagtctatgaggttcccgatagcccggagatttatcttccaggccagcaatccgttgaaacctccgtgactcagttgctggtggaattgaaaaagagcggcattatacgctcaaggattcatcacggataacgtcaacaaaaagcacattattgcgttttcagtgatgtgcttgtgtaaaatagcttcattcaactatttttctcctaccctgttttgtgatagtggcgtcattctttgagttatgggatgattgacagatatttcagggggcggaaatgggtaaactgacgctactattactggttttacttggatggctacagtactcactgtggctgggtaaaaacggcattcatgattatgtgcgagttaagaatgatgttgcgatgcaagagcgtaataacagcaaacttaaagcgcgtaacgatcagttatcggcggaaattgatgatcttacgggtggacaggaagccatcgaagagcgatcccgtagtgaattgggtatgatcaaaccgggtgaaactttctatcgtttaatcattgataaatctaaagaaaacacttcgcgtccctcgactccaaataatactcaataattaaaatgaacaatctattacttcgttccagtgctgatattattgctttggtaccagcagcgggtattggtagccgaatgaattcggattgcccaaagcaatacttgtctattgctggaaagactattattgagcacaccttgtctgcattacttgatcatcctcgtattcggcatgttgtgattgttttaaatcccacggacacacagtttcaatctcttgaggttgtatcagattcgcgtattactacggtaaccggtggtgaacagcgagcagattctgtgctggctggtttaaatcatctggctcatgtgactggcaatgataattgttgggttttagtgcatgatgctgcccgcccttgtttacaccatgacgatcttgaccgtttgttacaattagcagaagccgatgaacagggaaatatggcatgcggtggtattctggcatcgccggtccgcgatacgatgaaacgcggacgggttggtcagattattgaccatacagtagaacggcaagatctctggcacgcactgacaccgcagtttttcccattgatgttactaagggattgtttatcaaaagcactttctcaacacgctaatattacagatgaagcttccgcactggaatattgtggttatcaaccggtgttggttaacgggcgttcggataatataaaagtcacgtgccctgaggatttggcattggcagaattttatctgtctagaaaataaaggaacaggcatcatgaggatcggacacggtttcgatgtacataaatttggtggtgaagggccgattattatcggcggtgttcgtattccttatgaacaagggttgttggcgcattccgatggtgatgttgctctccatgcggcaacggacgctttgttaggtgctgcggcattgggcgatatcgggaaattattcccagacactgatccggcgtttaaaggggtggatagccgtaaattattgcgcgaagcctactcacgtatcagagaaaagggctatcggattggcaatctggatattacgattatcgctcaagcacctaaaatgttgccgcatatcccacaaatgagagtcaatctggcagaagatctgcaatgtcacattgatgatatcaatgttaaagccacaactaccgagaaattgggatttgttgggcgtaaagaaggtattgcttgcgaagcggttgctttgctggttaaggaataattgatggtattggctgaattaaattggctgtatgggcaaccagaagcgacggggatattaaaggcttcgccggaagattttattgtctgtgaagatttgggattttctccagatggagaaggtgagcacttaatggtgcatattcgtaaaacgggttgtaatacccaatttgttgcagatagccttgctcgtttcgctggtataccgtctagatcggtcagttatgctggcttaaaagaccgtcatgccgtgacagaacagtggttttgtttgcacttaccgggcaaacaggaacctgattttgcctcgtttcagcttgagggatgtgaaattctgacgacagcccgtcagaaacgtaaactacgcattggcgcattgaaaggaaactcatttacgctgattttgcgggaaatcagtcatcaccaattggttgaaaacagattacggctgattcagcaaggtggcgtgcctaactattttggtgaacagcgttttggtcgggatgggcagaatctgattcaagcgcagcgttgggcgaataatgaaatccgagtaaaagagagaagtaaacgcagtttttatctgtcagcgagtcgtagtgctatgtttaatgcggtagccagtgcgcggattgctctgaaacagcaacaacaggtaataaagggtgacgccctacaattaacagggcgtggtagttggtttgttgctgacgaaactgaattgcctttattgcaacagcgggtgatcgatggagaattacaaataactgcaccgctgcctggtgacggtgaattgggaacacagcaccaagctgcggattttgaacgacaatatttgcagccttatgaatcgttgtgggaacttatcaagcgtgaaagggtggagggttgccgtagggcgattctggtgcagcctcagaatctgagttggcaatggcaagataatgacacggtgaaaatcagtttctggttacccgctggcagttttgctaccagtgtggtcagggaaattatcaatcaggatcaaaataatgttacgaatattgttgagtaatgatgatggtgtaactgcaccagggattcaggttttagcagcagcattgcgagaaaattatcatgtgcaggttgttgcacctgatcgtaatcggagtggtgcatctaacgcattgacccttgatcgttcattaagtgttaatacgctggagaatggtgacatttcggtattgggtggtacaccaacagattgtgtctatctcggtgttaatcggctggttcttccgcgtcctgagatcgttgtttctggtattaatcgcggccccaaccttggcgatgatgtaatttattccggaacggttgcggcggcaatggaaggccgccatctggggttgccggcattggctatttcactgaatggtgaattgcattaccaaacagcggcagaaatcacctgtcgtttgctacaaatgctacaaacaacgccgttgagggcgggtaatattttaaatgtgaatgttcctgatctgccacttgagcacattaaaggttttcgggtaacacgttgtggtagccgccatgccgcggaagaagtttattctatgcaagatccgaaaggcaacatgctttactggttggggccaccgggagataaacatgatgctggccctgaaacagattttgcggcggtggaacagggatatgtctctattacgccattacaggtagatctgactgcgtataaagcgcaggcgttagtaagagattggttagctaaagctgaggttgatggagaatgctgagtcgggcaatgaaaaatttgctgacacaattacgccagcagggaatagaagatgaacgtttactggccgccatttctgctgtgcctagagaacgttttgtcgatgaagcactggcacataaagcgtatgaaaatacggctttgcctattggttatgggcaaacgatttctcagccttatattgttgcccgtatgactgaactgcttcaattaacaccagatgctaagattttggaaattggtaccggctctggttatcagacagcaatattagcgcatttggtcaaacatgttttctcggtagaacggatcaagggcttacagtggcaggctaaacggcggttgaaacagctcgatttgcataatgtttcaacccgacatggagatggttggcaaggatggccgtcgcgtgggttatttgatgctattattgtgaccgcagcgcctccgtatatcccacaagaattgatgcttcagcttactgatggtggagtgatggttttgcccgttggcgagcatacacaaattcttaaatccgtgaaacgtcatggcaatggttttcatagtgaagtgatcgaagctgtgcgctttgtgcctcttgtgcaaggggaactggcttaaattcatagtctattgcaactatttttcaattaatggttatatttgctttaataagcgaaattattttcgttttgagatttttgtggttatgtataacctttaagaattattaatttttacgcttatctttgccgttatgggggaaggaaatatgaattcgggaagcccaatgaaaaaaatacagcggattgtaacgtgtttattgatgggagtctggttagtcggctgtacaaatacaccaactcgccctgcacctatcactagtattgatcaaaaacaaaacagcgggagtcgttatccggtaatatcttccggcaattctgctgtatctacgccaatgccatcttcaccttcgtcaatgggtgcggctgatagcaatttgcaggggagaatcgtttataaccgtgattatgacagtattcctaaaggtagctataacggcaatacttatacagtcaaacatggtgatactctgttctatattgcttggatcacagggagtgattttcgtgatcttgcgagcaaaaataatatttcagaaccttacagtttgacggtggggcagactttgaggaccggtagtagcgggatgttaaccacttataaccataatcaaattcaaacaaccctggttgattctcaatcaactaatgcgtatcctgcaaattccgggaagcaaaagagtgtaaaaatgttgccaagggcaactacgtcaacagtaagcaatacgtatttagaatcaccgacgacaaccgcaagcagcggaaacagcgctgtcagcagttggatgtggccggctgaaggtaaaatgattgagagtttctctgatacccaagggggtaacaaagggattgatatcgcaggtagcaggggccagtcagtatttgcaacagcaggtggtcgagttgtctacgccggaaacgccttacgtggatatggaaatctaataattataaaacataacgatgactacctgagtgcctatgctcataacgatacaatgctggttcgtgagcaacaggacatcaaggcggggcaaaaaattgccactatgggtagcacgggtaccagttctgtaagattacactttgaaattcgttacaagggaaaatccgtaaacccgctgcgttatcttccgcagcgataaactgggcagaatgctgaattctgcctgcattatcatgggtaggggcagcttatgagccaaaatacgctgaaagttaacgagttgtatgatgatgcggatttagatgaaagtggtattgaagctgacgacttcgatgagaaattattgaagaacgatggggatgatctaactgattttgagaatgatttagatgtattgcagggcatgagccagcgggttcttgatgcaacacagctttatctcggcgaaattggtttttctcctttgctgacggcggaagaagaggtttttttcgcaaggcgggcattacgtggtgatgttctggcccgccagagaatgatcgaaagcaacttgcgattggttgtcaaaatttctcgtcgttatagtaatagaggcttagctcttcttgatttgattgaagaaggtaatcttggccttattcgtgctgttgaaaaatttgacccggagcgcgggttcaggttttctacctatgcaacatggtggattcggcaaaccattgaacgggcgattatgaatcaaacccgtactattcggttgccaatccatattgttaaagagctcaacgtctacttgcgtacagcaagagaacttgcccataaattggatcatgaacctagcccggaagagatagcagagcaactggataaaccagttgatgacgtaagccgtatgttgcgattgaatgaacgtatcatttcggttgatacccccattagcggtgattctgataaagccctattggatgttttatcggatgagaatgaaaccgggccggagggaacaacacaagaagacgatatgaaaaagagtatcgtcaaatggctgtttgagttgaattcgaagcaacgtgaagtattagcgcgtcgttttggtcttttgggatatgaggctgaaacgctggaagatgtgggcaaagagattggtttgacaagggaaagagtgcgtcagatccaggtcgaaggtttgcgacgtctgaaagatattatgcaaactcaaggtttgaatattgaagcgttattccgtacttaattgttgaatagtttggctacttgggttctgaagagctgttgtccctgcttttgcattgttgatgcttggtattatcaggttcttcagtacccggtaggattctcctaattttgtcttagatgatgatagtaaatttcaatcaaagatttctgatacttaaattgcagtgatgtgattaacgccccttttttgactcctttcctgatttcctttgtcgggaagttgtgtggtgaattgtgttaattagtgccctgatttgcgctagcaatgatgccagttattcaaacaggtcaaacattcatgcggggcattattcacaatgctcccgtaaggcaggtgtatacgaaaaaatgggacaaatttttgagaaaattgttggtgggctacacgttctgtgtcagctattttggtgaaaaaatgaagatgattttattatcagtgcgacaaattgcggtgaacccttctacttagtggttttatctgcctctccagagattctatgctcgattggtggcagtccagagagagaaggaaatctagtctaagtagttaccagccgacttgaggttgcccttatgaacctaaacgacgcgtcaataaatttaatcgaaaataattgagagttgtgtcacaagtcactattttgattactatgcaaacttaatagttttaataaaattgactgtataatctaaagaaaaatttttcaataaaggatgcggaatgatatttttgttatcacgaatcattgataccattgttttttttctattatttttaacggttagttatttttttattttagataaaaacgtaaaaaaaacactaatttcatcggtggcaagtattattgtttttattttagttgatattttttctccgttgctactttacttttttttaaatctatctgagttcctatattatgtcgtgcattaaatgcacgacagtaaatatctgctattgtttatcaattagtggcttgattttattatcatatacccaagaaacttcaagatgcagtttttagcacctgaaaatggtcgttaattctagacatcagcgagtccgctatatccggtagcgttgtggtgaaaaatttgaagacgttgtctcgaaattcatgtttatccgcaaaataacggttatttcgaacctgttcattcatgaccttccataatcgctctattgggtttaaatttgggctatagggaggaaggtaatgtaactcaatattgctaacataagcccactccttaacaagatgagctttgttgtaacccgccccatccacaataagatgaattttttgatgatagtcaggataagactttcttatttcattgaaaaaacagcaaatgttgtagtcattgatggtttgatattcctggaacaccgtacgaccaatggcattcaggttgagcgcgcccaatatattcaggcgagtccggcttcctgttgtttttactgtttttttctcgccttttcgcatccagccataaccgagtttggtgccttgagtcgggtgaacagcatcaagaaaaaggatgggttcgtctttcgctgtgactttaagattctcataatattcaataaattgtcgctgtttttctgcgtcgaatttatgagggacgccacaaggttttttataagaaaaaccctgacggtgtagccatttattcatgccgggaatgctaaaggtaatattccagagctgagcaacataggccacgatttcatgggtgtgatggaaaagatgttgagataagtgattgattaaaaaatcagtttgttcttgagaaagcaaactatcagaccccccattatcagatttaagtttaccttgattaaggtaatcgctgatatgacggttaacggtcatttcatgaagacgcagggcctgagcgatcatcactgaactccagccttcagaggccagcaggaccgctttgatgcgatcacactccctcttatcacggcaggtgtgatggagatgttcaagttcggctttttgttcatcggtaatgaatattttcatagcgaggataatgatctccatttcggataaaatcaagcatcttcaatgattacgggtatatacatttttatcgatatgaaattattttatatttcatatataccctatggatttcaagatgcttcgcgacggcaagggaacgaatccccgggagcataggtaactatgtgaccggggtgagcgagtgcagccaacaaagaggcaacttgaaagatgacgggtatagtagtattaaaatggcatgtatcgttatcagtacaattggatagaataaattaataaaaaactcaccatttaagtctggttatttttatggctcacaatagcgcattcgtggttaatcaaattaacctaatggggaaaaggggtctgaacatttttaaaaggaaaaataaacctcgttattttgaacgaggtttgtcatcgatttgaaaggtgagtataagctcacctttcttttgttaatcaatctacattcagttcaaattacaggaatgccactgtgaaatttaaaatcgctatctggattttgaatcaattcagcttcaacacggccaaaatagtttacccgttcggtaatatcttcattagcaatagattgcgctagtgaaagatagtcttggtagtgacgtgcttcagagcgcagcagcgagatataaaatttactcagatcttcatccaaatgaggggccaatttggcgaagcgttcacaagaacgcgcctcaatataagcgccgataatcagtttatcgaccaatgtataaggttcatggttgatgatatggttaagcatgcctttagcataacggctggcagtaatgctttcatagttgatatcgcgtgcgtccatgatttctagcacttgatagaagtgatgtaactcttctttaatcagcaataccattttatcaatcagatcctggctatagagtgaattagctttggcggtgatctgtttggtcgcttggttttgacctcttagtgaattgagatcgccaattttcttgtaagcaaaatcttcataaggtttaaaccatgccagaagtgtatcctcacttcgctgatctactgcatactttcggatcaaaaacatagcgctctgtgctgctttcagttcgcataatagatgatcccgtagaagcacaggtaaattttcaggctgctttgctttatctacccacaaattcggggtttcacattgcaaaaaatggtatatcggttgtaaaaggtttttgtcaaacacgttcttacaccatatcttttagtcgataaatccattctaatgcttgacgcggagtcagtgaatctggattaagattttctaatgcttcaaccgccggtgatgtttcctctgttaatagcgcaagctgcggtgtatcgacatgacttgccgttgcatggttggatagcgattccagctctttaagtttctggcgcgcccgtttaatcacttcacgtggaacgccggcgagggaagcaactgccaacccgtaactcttactggctgcaccctcttgtacgctgtgcataaatgcgatggtatctccatgctctaccgcatccagatgaatattgaccacgccttcaagtttttccggcaacgtggtcagttcaaaatagtgagtggcaaacaaggtcattgctttaatgcggtttgccagattttctgcacatgcccatgccagagaaaggccatcgtaggttgatgtgcctcggccaatctcatccatcaataccaaactttgttctgtcgcattgtgcaagatattggcggtttcggtcatttccaccatgaaggttgaacggccggatgccagatcatcggaggcacctacacgggtaaatatacgatcaactgggccgatgactgctttttcagccggtacaaagctaccgatataggccagaagtgtaataagtgccgcctgacgcatataggtacttttaccgcccatgtttggaccggtaataattagcagacgccgctgtgaagataaagagagtgggtttgagataaatggttcacgcagaacttgctcaacaaccggatgacgaccaccagtgatttgaattcccggtttatcactcaatgttgggcaaatataattcagggtttcagcgcgttctgccagatttgccaatacatcaagttcagccagtgcttcggcactggtttgtaattcggccaaatgaggcagcagtagatcgaataattcttcgtaaagcgctttctctattgccagagatttccctttagaggtcagaaccttatcttcatattcttttaactcggggatgatataacgctcagcatttttcagtgtctggcggcggacatagtgaattggcaccagatggctctgccctcggctgacttgaatatagtagccatgaacaccattaaagccgacttttagagtatcaaggcccagcttttctcgttcgcggatttccagttgttccagatagttactggcaccatcagccagtgtgcgccactcatccagctcactgttataacccggtgcgattacgccaccatcccgaattaataccggaggtgtttctacaatcgctttttcaagcaattcctgtaattcatcaaacctgccgatatttttctgcaattgcttgatataaggggaatctgaggagtccataacttgatggatatccggtaattgctggaatgcatggcgcattcttgccagatcccttggacgagcagaacgtagagccaagcgtgctagcacacgttcaagatcacctatctgtagcaaaaatggctgcaactccagcccaatttcctgcaaggtagcaatagcttgttgacgattttctaatatctggcggtccctgacaggcgcatgcaaccaacgtttcaacattcggctacccattggggtaacacacagatcaagaacagaagcgagagtattatctgtactgccagacaggttttgtgtcagttccagattacgacgggttgcggcatccataataactgtatcttgctgacgctccatcgtaataccacggatatgtggcagcgccgtgcgttgagtatctttgacgtattgcaacaggcaacccgcggcacgcagagcgagagttgctttatccacaccaaaaccgacgagatcacgggtaccaaattgcaggttcaattgctgttttgcggtatctagctcaaattcccataaagggcgacggcgcaggccatgaaaattttcaattagcgccatatgctcaaaactttcaggatagagtaattcaacaggacggctacgttgcaattcagcggctatcgtttccagctctatcatttcagatatttggaagcggccagatgtcacatccagtgtggcataaccaaagccttgattatcgtgccaaatagccgccagcagattatcttgccgttcctgtaatagcgcttcatctgtcacggtaccgggagtaacgatgcgaacgactttacgttcaaccgggcctttgctggtggcaggatcgccaatttgctcacagatagcgactgattcacctaattgaaccagcttagctaaatagttttctactgcatgatgtggcacgcctgccatagggataggattgccagcggattgacctcgtttggtcagggaaatatccagcaattttgcagcctttttggcatcgtcataaaatagctcatagaaatcccccattctgtaaaacagcaggatatcaggatgctgtgctttaagacggagatattgctgcatcatgggcgtgtgggtgtcgaaggtttctgtattaatcatgcagtagtcttagttaagtttgtgaatcaattctttcgttatggtatcgcaccaagctttaaacttacacaagtaaaatctggaagcaattcgcaaatttagttgtaattttggtctggttaaattgtaaggaaaccagctaaaagccagtatacctgaattagcggcttatgaagttttagatactgtgcccgtatcgttttcttttgaacatgctgcggaacttttccaaggtttggttaaccttagcccgcgcaaagtagaaatactccttcattccagtcatgcgatccaaactaatcgtttatatctttttttgaccgactattattcccacgaatgggctaagcgcattgataaaactaaaattgctttaggagcagggaagcgtcaagtcgtgttagggggaaagttggataaacagtatcagattacggttccggaaaagtatttgaataatggattatttcatggataaatattctccatattaccgacaagtagtgttgttaatgagtgtactgcctgtagtggcgacagagagctgttgtgcattgaaaggtgggacggcgattaatttgtttgtacgtgattttccccgtttgccggtaaaaatctcatattcgatatacaaacctggcatcgattcgaattagcatattatcgttgatgacaaggagatatttttgtctatctgaaacagacttttagttgaatatacctggaaaataacttcaaacagaataacttcttttaggtacatgattaaatcaggatctacttttctcaatagccagattatgaattgtgtgctttaataatgactcaatcaaatattttaaacaaaattaaaaaacatgaaaaatgtatttaaaatagaaaacagcggggggtttaaaatgaaaaatagtttatttcaaattgatcccacttaaataatttcgtgtaaaacaacatataataatatgtaatcacataatacgagactatatttaattaacccaaattctggataagagaacggtctggtgttttcttcctggggaaatgtatttagttggcgaggatcaacaaaagcaggattcgattgttcaagtgcgtcgtaatatggaaaaactgatgtgaaaatatatgtacgtttggtgaagctcaaattagaaaaaggataattaaccttatataccctatggatttcaagatgcatcgcgacggcaagggagcgaatccccgggagcataggtaactatgtgaccggggtgagtgagtgcagccaacaaagaggcaacttgaaagataacgggtatatcttgattatcacttttacagagcgataatcccctgactgatcatcagggatgctgttgtgagtttgttattattaacctgaactttagcctgtcattcaatagagttcggaattcagagtaaaccacaacagcatattctttatcgcctttaagattgaacggtatcttgtgccgtttgaaatggcttttatgatgaaaatatcgtgttcgaacctaatgttgccggggaataatttaactgaacaggccaccctgttgtacaaatggggttacggtggcattgcgctatttatgaattattgccaatggaacgaagagttacatgaagaaattctgaatttaagggaaaacacgggcattattccgtgtgaatttgcctttaccgatgagatttacggacatttaatgagtgacaatatcgatctcagaaaaaagagccgagacgagaaatgtataagcgagtggccgaaatcagtggtgaaattggcgcggtcactgagctggaatttacatacggcacacagaatcctctgctgttgtttcatccctataagaaaatgacagagactgaaaaataagagtttcttgaaatgtacaaagaggttaccgcttctctcatgggaacaacaggaaaaatgctgttggaagggattaatcggtatgaaagcccttatttgaacagcatcaaagaatgtacggatattattgatacgttagatagggaaaacacaggggttttagctgatttcttccacatgtcaatagaagaatcaaacatttcagaaagcattaaatatgctggagacgctattaaacatgtccatttaggtgacaataaccgtctgcttcctggccatggaaccattgactggcaggcaggttttaatgcgttaaaagaggttggatataatggttttctcaatttggaatgtagtacctgtggagatccacctaaaacattgcccgagactgcaatatttttaaagaaaatgttgaattaggggattttgtgaaacgtgtttttgaaatcagcaaaccattttttgaaattggtcctaaataccatcagtccggggtatataccctatggatttcaagatgcatcgcggcggcaagggagcgaatccccgggagcatagataactatgtgaccggggtgagtgagtgcagccaacaaagaggcaacttgaaggataacgggtatatagcgacagatatgacgctgaatgatacagaataaaaatgaagaatataaaaaactattttctccagatcttaatagatcgagaaaataaccttaaactatttcccataatacacaatagattataaaaattgaaaagatgcttgcaatataacgtctgtctgatagtgaagtaaaactaagctaaatatttaaaaattttgaattctgaaaaaatatttaattgtaaggtttgaaatgaaacagaatacgagtggttttttagaacgaatgggtatacccagcacattatcatggggatatttgggtattttggcatttatgattggtaatggaatagaaataggctggctaagcccttatctggtagataatggattaagtatccaggacatttccacactatttagtatttatggtataagtgtagctatatcttcttggtttgctggcgtattttttgaggcatttggggctaaacgaaccatgctattaggcacaattttttgtgttgttggcaccacaggtttcgtcagcctaggcttaaaagaaatatcatatccacttttgttgatagcgcaagccattaaaggtttcggatatccgctatttgcctactcattttcagtgtggattgcctatagaagttctgttgttaaactcagtacagcatatggatggttttactttgttttttcaggtggaatgcaagtattagctactttttatgcgagttgggcagtagaagaattaggtcatattaatacgttatggacaacactgatatttattattgttggagctttttttgctctagttctcaatcgcgataacattaaacctcaaagtaacaataatactcttggaaatataaaggaggttttgaagggaataactattcttaaggaacatccaaaactatttatttcttgtatccttcgaatcataaattcactttctcaatacgcgtttcctgtttatttaccggtatatatgatttctcaggggtttactacaactcagtggctaagcatttggggaactgcttttacgagtaatattctatttaatttggtctggggtatagcaggagacaaaataggttataaaaggacgattatttggtgtggcggggtcctgactggcgttgcttcattgcttctgttttttgcaccacaatttgttggagcaaattatgccatagtactcatatgtgggatttgctggggagcgggtgtcgcaggttatatcccattggatgcgatgtccgctaatatggtagaaaaagacaaaggggctgtcatgtcagtactgaatttagggacgggtttatctgtggtgattggccctgccattgttggtttatttataaatagcctgggatcaagtggcgtcacttgcatcgttgctacgctttattttttcggtgctttgattactaattttttggatgaacctgagagagtttctaaaaccattattcaacccgacgctattacaatgaataagtttccaaactcataaatgagtgttcaattggttacgcgttcaaattgtatatggttctgagttcatagacattggtaagaaattttttgcccgtgtgtctgtgatcacccttattaataacggttctggtggaaaaggttttgttcaccggaaatgaacactggttcatggagccagtttgaatcactatcataaatcaacgggagaagtaagctgatatgataacaactcaaaacgactggcacccagcagatattattgctgaattgcgtaaacgtggcacaacacttgccgcattatcacgggaatcgggactgaattcatcgacgttatcaaatgcattaattcgcccatggcctaaaggagaaaagattattgcggacaagctcggaatagatcctttagttatttggcccagtcgatattttgataaaaatggaaatcccattaagcgaaattttcataaacgatgaggttaattataatgataaaaactctatctattcctgattcaaattcaatatgattattccaaggtgtatatacccaatagatttcaagatgcatcgcgacggcaagggagcgaatccccgggagcataggtaactatgtgactggggtgagtgagtgcagccaacaaagaagcaacttgaaagatgacaggtatatgtttcattagagcaatctatgtataactcaggtctggaaacttctttatatgaggtgatctttgaaaaagccgctaaaggatattcagaatcattgttgaactttatttcattggcctgtgatataaatgaagacgtttatagtgcttttgccacacatgatgagaaaaagaacattgatgttgtgaataacccataattgattagaaaaactttcaaatatttattcgagagaatagtaagtataatttaagcgttacctttgtactttatttatatgttctaattaagtcaggtagcgctttttttaagctgtttttcgtgcatataagtttaggggctgtcctaagtaactgatcctaattaacccgaattctgttcaagtcatcactggaaaatcgtcgacatcgcagaaaatttctattaatttatccatagcctgttcctccccggagctgtttcggcgtgcaccaaaacattgctcctggaataggtttcatgtcaatttcttatccagaatttgggttaattaaatatagtctcgtattatgtgattacatattattatatgttgttttacacgaaattatttaagtgggatcaatttgaataaactatttttcattttaaaacccccgctgttttctattttaaatatattttttttcatgtttttttaattttgtttaaaatatttgattgagtcattattaaagcacgcaattcataatctggctattgagaaaagtagatcctgatttaatcatgtacctaaaagaagttattctgtttgaagttattttccaggcatattcgactaaaagtttgtttcagatagacaaaaatatctccttgtcatcaacgataatatgctaattcgaatcgatgccaggtttgtgtatcgaatatgagatttttaccggcaaattataccctatggatttcaaggtggatcgcgacggcaagggagcgaatccccgggagcatagataactatgtgaccggggtgagtgagtgcagccaacaaagaggcaacttgaaagatgacgggtatattcaatcaaaagtatatctttgtcatgaacaataatacatgagtttgaacccgtattgagcttacatgtcgaatattgggttaactccagcaaattaagcaccactggcccgatgcagagcagtgaatattttctttaatgcatcgggccagaagattacgtttgtcttgtgcgaagctggctccttccagattatttgatcacagaagcgtcgatcaaggtgataccaccgataagagcccaggtggtccacgatgatgtggttgatgaagtagtttgccagagatgccagagtgccttatcaaggccaagcacaaagacctcaatccggccgtctgaattcttcgctaccgttggggcactggcaataatgccggtaaatgagctccagttagaccacgggccgttttgggaagtttgccaggtgcgccagagcgtgttatcagcgccgcgagcaaagacctcaagccggccagagatattcttcaccgccgctggggcgctagtgatcacaccatccaagcattgccagtttgaccatgaaacggaatcagagccgatctgtgaaatgtgtcggagtgtgttatcagcaccgcgagcaaagacttcgagccgaccatcgcagttgccgatgaccactgggtcgctagtgattacacttttcagtgactgccaatttgaccattgatcagtgtgagcagccgtttgccaaatgtgccaaagggcattatcggcaccgcgagcaaagacttcaatccgaccatcggcgttgatatgtgcagccgggttactggtgagcgtgccacccagagatttccagtttgaccacgaattggtatgggctgcggtttgccagatgtgccatagcgcgttatccgtgccgcgagcaaagacctcaagtcggccgtcagagttgagacatacctcagggttgctggttatacctccatacagtggctgccagcttgaccaggtattggtatcagcggcggtctgccagttgtgccagagtgcattatccgtactacgcacgaatacttccaatcgaccgtctgaattacgatgaacggcgggtttgctggttactactccgttaaacttgttccagccggcccaagaggagtttgggagcggtgctgtttgccaattgtgccacactgcgctgtcagtgcttacaccgaaaacctcaagtcgattatcggcattgtttgctactgagacaattccagataacgctatcgcagagttctcgattgctacctcacctgcaacatatgcttcggtattatctggatttggcattttaataggttcttttttcatatgtatattctctttaaaaataatttttaggattcagaaaataatcatttgatgagagaggtattcgtatttatatattgatgttttcactagtctcctatgttcatttattaatgaaataaacggtggatgtttttgttttgttaattattgacctgtaaaatgttaattaaatatagtctcttattatgtgattacatgtttttatatatttttttatacgaaattatttaagtggaattaatttttcacaaactgtttttcattttaaagtccccgctggtttctattttaaatatatttgtttaatgtttttttatttttttaaaatattttattgaataattattaaagcacataattcataatctggctattgagaaacgcagaacctgatttaatcatgtacctaaaagaggttattctgtttgcagttgttttccaggaatattcgactaatcgtctgtttcaaatagacaaaaatatgtccttgttatcaactaatatgctaattcgaattgatgccaggtttgtgtatcgaatatcagatttttaccggcaaattaagtgccactggcccgataaagcgcagtgaatattttctttagcgtatcgggccagaaggtgacgttcgtcttgtgcaaagctggattcattccagattatttgattgctgaagcgtcgattaagctgcctttgagagacacccaagcggaccacgatggtgtggcttgccagatgttccagagtgcgttatcggtgccacgcgcaaaaacttcaagccgaccatcggcgtcttccactgccgttggcgcgctggtgatcgttccatttaacgtggcccagttagaccacggaccggaatgggaaactgtttgccagatgtggtagagcgcattattggtgccgcgtgcgaaaacttcaagccgaccatcggaattcttcaccaccgcaggagcactggtaatcacgccattcaacgaagcccagttggaccacgggccgccatggggaacggtttgccagatgtggtagagtgcgttattggaaccgcgcgcaaagacttcaagccgaccgtcagcggtgccgatgacgacaggatcgctagtgatgacaccaccgagtgagtcccaacctgaccactgattggaatcaggagcggtttgccagatgtgccaaagtgcattatccgtaccacgcgcaaagacctcaagccggccgtcggagttgatatgaaccgccgggttgctggtgatcacgccgttcaaagattgccagctagaccacggaccggaatgagcagcagtttgtgagatgtgccaaagtgcattatcggtgccacgtgcaaagacgtcgatccgaccatcggtgttgacatataccgcggggttactagtaattgtaccccctaaagattgccagtttgaccaaccagcattggtggcggtttgccagatatgccagagcgcattatcggtgccacgtgcgaatacctctagccgaccgtctgtattgatataaacgacaggtttgctggttacctttccattaagtgagatccagccggtccaggaagagcctgagtgtggtgctgtttgtctgttgtgccacacggcattgtcagtgcccacaccgaaaacttcgatccgaccatcggaggtgtttaccactgaaacaatttcagacaaggcgattgccgcgttttcgattgctacttcacttgcaacaagtagctcggcattatctggccttggtatattagtaggttcttcttgcatatatatcctcgttagaaataattttgcagattcactaaatagtcatttaataagcgagatgtttaattctttaaattaatattctcactttttctctttattttttgaagaaatcattaatgttttatttgatgctgattaatggtccgtgaagtattaagtggatgtgatgctacattataaaatctcgtgtgtttatatatatttttacatacagccattcaaaaataataaattataaataaattatttccctgttttaaggtttccttttacttatatttgaaaaatatatttttatcataaataacgggaatgaacttgagtgaatacccggcttgtgtgtcgaatattgggataacaccagcaaattaggtaatactggcctgatgcggggtagtgaatgttttctctaatgcatcaggccagaaaatgacgcagaatctggtttcctccagattattttatcgctgaggcgtcgattaagttaccgccaagggaggtccaagtggaccacgatgatgtagtttgctgaatatgacagagtgcgttattcgcaccgcgtgcaaaaacttcaagccagccgtcagaattcttcgccactgtgggagcgctggtaatcacaccagacaaagaggtccattcagaccatgcatccgatgttgccgtctgccagatatgccagagagcgttatcggggccgcgcgcaaagacctcaagccgaccgtcggcgttgatatgcacagccgggtcgctggtgatgataccagacagtgaccgccagtttgtccaacctgcattaggagcgacctgccagatgtgccagagagcattatcggagccgcgtgcaaagacctcaagtcgaccatcagagttgctgatcaccactggattgctcgttatcacaccactcagtgactgccagtttgtccaaggataggtatgagaagccgtttgcttgatgtaccagagagagtaatcgttgctgcgtgcaaagacctcaggccgaccactggcgttaacatatactgttggatcactggtgagcacgccatttagtgactgccaattagaccacggaccggcatggggagcggtttgccagatgtgccagagagcattatcggcaccgcgtgcaaagacctcaagtcggccatcggagttgatatataccactggattgctggtgatctgaccacctaaagattgccagcctgaccaaccagcaccggggacggtctgccagttatgccataacgcattatctgtgccacgtacgaatacttccaatctgccgtctgagttaatgtgaacggcgggtttgctggtcgctccttcattcagtgagtgccagccagaccaggaagatccggtattaggtaccgtttgccagttgtgccacacagcattgttggtgcctacaccgaaaacctcaagccgaccatcggcgttatttgccgccgagataacgccggataacgcggtccaagagatttcattggatatttctatttcgtctgaaatagatgatttggtattatctggccctgatgtattaatagattcttttttcataatatatatcctctttaggtatcattttttagactcactaaatagtcatttaataaacagtgtatttaatttcacattaatacttccgattgcattctgtgtatttttattcataaaatgaataaatgatattttattttgtgttaaactttaattattaatttattgggtttaattttatattatggatgtctatgttttggatatgtattttcaaatacgaacatctaaaaaacattaattatatataaactgttttcttattttaaagttttctttgctttctattttaagtctgtttttttacggttatatttgtttttttattcaaaatatctgatgatcgttattaaagtacaaaattcgtcatctggctattggattaattccagcacattaggtaatactggcctgatgcagagtagtgaatgttttctctaatgcatcaggccggaaagttgtgctcgctttgtgcgaagctagattatttgattgctcaagtgctgattaaggagccattaagggataaccaaggggaccacgatggtgatgtggtttgcctgatattccagagtgcatgatcggagccaagtacaaaaacttccagcaggccatcggcgtcttgcgccacagttggtgcgctgatgatattgccgttcaatgaggcccagctcgaccacgggccggaatgagaaacagtttgccagatgtgccagagtgcgttatcggcaccgcatacaaagacttctagccggttgtcccaattcctcgctacagttggtgcgctgatgatattgccgttcaacgagacccagcctgaccacggaccggaatggggaacagtttgccaattgtgccaaagtgcgttatcggaaccacgcacaaagacttccagtcgaccatcaacggtgccaataaccgcagggtcgctactaattgagccgttgagtgactcccaatttgaccacaggttggaatcaggggcggtttgagagatgtgccaaagtgcgttatcggagccacgtacaaagacttcaagccgaccgtcggagttgatatggacggctgggttgccgatgatgttgccattcaaagattgccagcttgaccacggattggaatgagcggcagtttgagagaggtgccaaagtgcattatcggagccacgtacaaagacttcgagtcgaccatcggtgttgacatagaccgctgggttactagcaattgaaccccctaaagattgccagcctgaccaaccgagattgggagcaatctgccagttatgccataacgcattatcggagccacggacgaatacttccaatcgatcgtctgtattgacataaacggcgggtttgctggtcacgttgccattaagtgagagccagccggaccagggagagtttgagtatggtgttaattgccaattgtgccacacagcatggtcagaacctacaccgaaaacttcgagtcgaccgtcggaggtgtttgccactgagacaatttcagacaacccggttgcagtgctctcgatttctacctcatcttttttaacatatgattcggtattatctggatttgatgtattaatagattcttgttgcatatatgtatcctcgttagaaataatttcttttgctcactaaatagttatttaataagtgagatatttaattctgtgaattaatattctcacttttatttttagagaaataatgaatgttctatttgatactggtttatgaacaggaaagtgtcaaataaatatgatattacattataaaactacctgtgtttatatattcacatgcatttattcaaaaataataaattatagatgaaatgttttcctattttaaaatgtatttttatcataattgttctagttttattataattatctgataaccaagcggttactttgttagagattactttctagataattcaattaaaagtctatttcagatggataaaactatatgtttatcgttaataaaatacgagaatgtcaggtttacatatcgaatattgggataacaccagaaaattgaagtattgctggcctgatgcagagtagtgaatgctttctctaatgcaccgggccagaaaattacgtatatgttgttcgaatttggctcctttcagattatttgattgctgaggcgtcgattaatgttccccctagggaggcccaagaggaccatgatgatggactcgtcctcttgatgttccagagtgcgttatcggtggcgcgtacaaagacttcaatatagccattagcgttttccacgacatctgggccgctggaaagtccaccacccaatgagccccagttggaccatgaaccggaatgggtatcattttgccagatgtgccagagtgcgttatcgatggcacgtgcaaagacgacaagccgattgtcgaagtattttattaccgctggtgcgctggtgatagtaccacccaatgaggcccaattagaccactgactagaattgggggccgtttgccagatatgccagagtgcattatcgacagcacgcacaaaaacctctagtcggccatcgacagtgcgggctaccactgggtcactggagagaacgccacccaaagagtgccagcctgaccaataaccggaatggggagcggtttgccagatgtgccaaagtgcgttatcggccccgcgggcaaagacttcaagccgaccatcggcattgatatggacggctgggttactggtgatcacgtggcccagagaataccagcttgaccacggattagagtggggagcggtttgccaaatgtgccagagtgtattatcgaggccgcgggcgaagacctcaagccgaccatcggcgttgatatataccgcagggttactggtgagcgctccgcctaaagattgccagcctgaccaactagcgttgggtgtggtttgccagttatgccataacgcgttatctgagccacgtacgaatacttctaatcgaccgtctgaattgagataagcggcgggtttgctggtcacacttccaccgagtgagctccagccggtccaggaagcgcctgtatgtgtcgtttgcccattgcgccacactgcattatcgccacctacaccgaaaacctcgatccgaccatcagaggtgttcgccactgagacaatgccagacgccgcgatggtagggttttcgatttcaacctcatttgcatcagatgattcggtattatctggatttgatgttttaatcggttcttttttcatatatatatcctcgttaaaaataattttttagattaaccaaaaagtcatttaataattaatgtcttaattctttaaaattaatcttttcatttatgttcttatttttcttaaaaaataatggctaataaataacttttcaaaatagtagaacacttggagggaactcagtccaatttttgcaatctgatcaattgtagataatcccaaaccactaaacggactgagttatgcctatcatagcacctataccccgcaatgaacgacgccagatgaaaaaaattatccagaacacccgagataaagattatgctcgcaggctcatggccatattgatgctgcatcgaggcgagtctgtctctctggtcgccaaaaccctttgcgccagtcgttcttctgtctatcgctggataaactggttgactttatatggtctggaaggactcaaaagcctgcctgtgggcagacccgctgtctggaatttaatcccgctttatcctttactgtcttttttattgcaatattctccccagcaattgggctgcctgcgttctcgctggagtcttgagttttttataattaaaatcaatgaattattaaacataaaattatccatcagtaccttctatcgttacttacataaaatgggtatcgtgtggcgaagggcagccccgacgcttaaattacccgatcccgagtaccatgaaaaaatggcgaaaattaccgaggcattgtcaacgtgttcagaaaaacatcccgttttttatgaagatgaagtcgacatcgagctgaatccaaaaatcggggctgactggtatttaaaagggcaacagaaacgtatagtgacaccaggaaaaaaccaaaaacattattttgcaggttgcctgaatgttcaaacgggaaaagtgacttatgctgacgggttaaataagaattctcagttatttatcaatgtattggaagaacttgaacgccagtattgtcatgctgaaaccctcactttgattttggataattacagtatccataaaagccgacgggtcagagattggctggcttgtcatcctaaatttaatctgttgtttttacctgtttattcaccctggctgaataaaattgagcgtctgtggcaatccttacatgaaacggtgacacgaaatcatggctgtcagtatatgtggcaattgcttgagaaagtgaaaacgtttttaaattcatgtccctacaggaatagcagagaataaaaagagtgagtgtattataattatgaaaagttatttattttatttgaaattaatttatgaaattaatttatgaaattaagttatcgataaggtatgattgtatattataaatctctataggctgatatatatttttacatacaatcatttaaaaacaattaattacatgtaaactatttcattattttaaagtttcatttaatttctattttaaatatattttgaaagttgcattaattccagaaaaataagggaaaataatttatatcgctttcatcctcgcccttttaccagaaagtggcatatcatggatatgccaccagcttaacgaatgaatttaaaaataagttgtgataccggcacgaaacgttctgcccggtgaagggatatagccgaggctaagaggttggatataatatttgtcgaacacattatccacaccgagctcaaattcgacatgcttatttatacgggcagtcagagagatatcggctacagttgcaggccgccaaataatgggtgccaacagaggagcagaaccgcgtcttggttttcctgctggtacagatctttgtccataatgggaaactctggcgttgacagatacattgtcatttaaaaatcgctgtgtcagatcgagtgataccgcatatttaggcggaatatgattagttgcataatccgaagggagactacgtgcgatgcacccgtcattttccgtacagaatttgacttttgtgtagtaattcatcgataaacgcgcatcaaagtgatcgctatggtaaacacttgccaattccaatccggcaaatttagcctctttaatattactgatgtacatactccagtaatcatccatccatgaccggctgatatagtccttcacccggttatcaaagtaggatattgcgatatcgaagctatcattttgagcaatgatatccgggaagcgtgatgtcagcccgacttcgatattttttgaaatttcaggttttatatgatcgtctacattcatcatgtagccacgaataccttcaaccattgatggaaaacgtggggcgtaggcatatttggcatgcagtgctgtttcatgattaagttcaagcttagtgcctacccaatagccatgagcatggtctcgcttattgttgactttcccagaagtgagttgtggtaaccaagagctacccggacgagctggactgtcatcttcgatctgataggatttgtaatcccatccgcccattagggtcaggcggtcggcaagcatatagttcccgctcaggaaaaaatggccttctttacgttctccttcccgattaacggcatatttccatttacctgcgcttgggccagtgcgttcacgaataaagctggcaccgtagttcaactcaatatcttgcattgaaagatcaaataatgaggtgttgctcaaattcaccccgactgtgcgcatgaattttttatcaccgagggtattatttgcggttcgagggcgatcgttaacccgtgtttgccatactccgatatccaaattaatccagggatttgacgcaggttcccatttatagttgaggctgtgcctgttcatgttgagccgtgtcagtggcccctgttccaagatcataaatgtttggctcaggtttgccatatccgcgacataggattccccgtagagattttggtaatggctaatgatagccgagatttcatgaccatcgccaaaacgaacttttcctttacccagtaatgactggctatcttcggaagtgttaggtacggcatctcccattgcgtacagcgaataaccggccatctgttcactgaattgtggaatgcggcaatcttgtggatcactctcacacaaatagcctggcatgccacgctccttagcgcccggtccgtgtttgccagagtggtaattaccccgcttgcgctgagaaacaccaaacagcaattcataggaaggttcggcaatcgcgaaaacaatactcccggtgcgatttttagcatcgaaaagagaggtttttgatggggaaggccagtcattgcgttgataatcgtcaggattagaatggttgttcaacagacttcctttcaggcgcactcctgccttttgtccatcgaggaggatatcactggcttcaatggtttttatctccaccgttcccccaatagctcccataccgccttttcctgtcgggcctttactgatatctacccggccaatgaaatcgggatcgataaaggaacggttggagacaccctgatagccgcggtaaagcgcggtctggttagatgcgccatcaacagtggttaggactcggccttgtccttgcaagcctcggatattcacatccaggctgcctgaactacgcgcttcgccggataatacccccggtgtgattttgaaaatatcaacggggtggatcacgccgaatttttcgatatctttgcctttgatggtggtactgccgaaccgcaatggttcattacctgaatacccgcgattgccagctaccgtaagaggatttagtacgattacacctttgttggtcatcttctttgtcatttttactagcgtgtagctgccatcggtacgttgggacagttgtaaatgactgcctgtgagcagttgtactaaaccttgatgagcgctgaaactaccgtttaatgaaggtgctgtgagtccgttggttaaattcggatcgaaggagagcgctgtcccggtttgagccgcaaagtgggacaacgaattgcctaatgaacctggtggaatatgaacggaatagagtgtatctgctggtgtggtggcgtaaagggaacgagtcggtagcagtattaatggtaataacagtgcgactaaagactttttctgccaacgtggttgtgaatcttggcagtcaacaggatatggcatagtaagtttttgatatagcatagtaagttctccataactttttcagcttcttttatttctatgccgtatgagattgaaaaaagtgtcagtaaaaatgattatttttattaactgggtgaggtgagtgtaatccaatagcgggtcaggcggcgtattgagagcggataggtttgtaatagcatatgcagtgccagatccgtatcccgtaggggaaaagcaccagaaacccgcagatgagctactgcatcatcgcaacggatgatgccggaacgatagcgattcagttcagtaaccaccgttgccagcggcaagttatcggctaccatcatgccttgtaaccagcttagagatgttattgaacgggtatgttgtggggcaacggtaaattgagtgaaatgggttgcttctccagcatgcagtatgtgtggtaaaccgttatctggcgtaatgcgaaccgctccttctactatttccacctgagcgtgtgaggcttgttggcggacgctgaattttgtgcccaatgccacaataacgccttgtttggtttgtactttaaatgggcgagctggatggcggttatctttatgggtttcaatatagatttcccctagctttagactaataagccgttgggtatcatcataatgaacatctgttgagctttgtgtatttaaagtgagttggctgttatccggtaatgaccagtgctggatttgccccgtttgggtgtgataatcgccagtgagaagctgaaattgatcagatcgccaaaagagtgatgatgcgccagccggtattaacaacataagtgtaagctttctgatggcttctcgacgggaaaggggctgtttgttatttaacagaggtgaggcgatatgcggtggtaaatggtgtaaccgtgctaacagacactgtgcgtgttcccaggcttgagcatgttctggactttgtgcacaccaggcagcgcaggcattccgatcagcttcgctggcatggctatcatgtaaaatggtcaaccattctgcggcttcggcaagtatcttttcagaaggtgtacttgataaagacgatgtatcagaggaagccataccaagccctcttatgccatcgctatcaggcattgataaaagccttgtttcatataacgttttactgtggacagcgaaatattcatctgatttgcaatatcttcgtatttcatgccttctatctgggaaagtaaaaagaccgtttgcactggcgtggggagttggctgagcataatatcaatttcctgaagtgtttcgaggatgataagtttttgctctggtgcgggaataagcggttcaggcagactgacgagtaaatccagataagactgttcaagtgagcggcgacgataccagttaaccatcaaccccttagcaatggtgacaatgtaggcacggggttcattaagttgctgtggtaaaggtgaacgaagtaatttaacaaaagtatcttgagtcaggtctgcggcagtttcatcgcagttaaggcgatgcttaagccaacgaaataaccaatcatgattgtggacgtacatccactggatctgttgagtgtctaaaacattaacggtcattttcatgctatgctatcaatgtaaatgcaaatcattatcacttttggtatgttacaggtaattgctttccgttaccaataaataatggatacgaacccgctgatcaaatgcatttttatttactataaataaaattaatgaattaatttgtcgttttgatcatgattgacagggctaaattataaggattttaaacagagatcgagaatttaaactaaacattcctttatagtgctatagaatatgagtagtacttcaaggaaattaaaatgacgattaaggcgttaatgacgtatattttaaggttaaatcaatggagaaactgattattatttatggtctataccctatggatttcaagatgcatcgcgacggcaaaggagtgaatccccgggagcataggtaactatgtgaccggggtgagcgagtgcaaccaacaaagaagcaacttgaaagataacgggtataattgatttgatctcttgttcatcctctattgagttttactgttagccgagtatttaaggtgttgagaatatctgaatagttattttttttaatagtttcaaattgaatttaatattaaaaatattttcacaagggaaaattttaaatcattttagatttaggggtatacccaatagatttcaagatgcatcgcgacggaaagggagcgaatccccgagagcatagataactatgtgaccggggtgagagagtgcagccaacaaaggggcaacttgaaagatgacggatataaagtaatataatgttgggtttattgatgagtgcctaatatatcatgcaattatcttttaatattgatgtaatgtaggcagttggaataataaatttgacattcaaaaatagcaaaattcagatatatagctataatagatggttatatatacgataattacagtggttaatatattaaaagcttaagtgaacgaggaataaaatggaaggtactttaattatttgtgttgattcgattctgagatttcgttcagattacgatacgacaatcgctgtgccgatgttatcagttcaggaacagttaggtaaaaatgatccgttctttttcttgaaatatttcagaaataaggtcctaatagaaaaaggagtaacaatatcaaatatatttctcgcgatagaaccgtggcaggctatgctaagcacttggttggaaattgatatttctgcttacattgcagagattagaaagccttctcaagaagaaccgatatttgattggatcagcattcagagaatcacgtcggttcatcgggtatatcagcgaaaagatatgaaagataatgaaaaactgtctgaatattttaatcgtgaacatacgccgacaaaatattttaatattgaatcagtttgtatggcatcgggttataggaaaggcgataaagagcattacagtatcagtgaatatatccatgaaattaaaaatattccagtcattgccagtgacaggcaaatattaattggctatgatgataataatacggatattttgaatgataaatgttttggtatatatgataatagaaatatcaaatatatacagggaacaacctcgtttgcgttttatgaattgatggaagctatttttaatgatggcttattctacaattcaccgcaaacagcttgtcatagcttagaaatgataaaagagatgttggaaattatagatcgcggaaatatgaatcacgaaaaggataataaagaatgtattcttcaacaagaaaataatagtgggaatattaatggaggtaataatgacagagaattaaatgttgagttttatgatggtgcttttgatccgctaatagaacatatagaaacagagagggagtattggaattatataaaattattatgtcattcgtatggtcatttgccagtaagaattggtacgattaatgaggctaaagttcctgaatatcgcttctataacaatattatagatgatgaaagttagcttttatggatgagctatatttcatcatcaagtattaaagtgccaatagatattatattttgttggttaagttgtttattttactttttattttgatttcttgggtttttcatatctgtgaccaagtggcattgaatgatgaaatttacgttttaggggatggaagcgatgctttagtgttttactttttcatgtattgtgttggcgaaaatatgaagtaatggaagtaaatatgtgtggtgatatatatcttataaagtataatttcttagaaaatacgcgttaccttttgacggaggtttgaaaatattttaactgtcatcaatctgggtgtataccctatggatttcaagatggatcgcgacggcaagggagcgaatccccgggagcatagataacgatgtgaccggggtgagagagtacagccaacaaagaggcaacttgaaggataacgggtatatagcgttttaacatcgtgtttaataggaaggtaataatgccgaaattaatttattacgtcgctacgacaatagatggttatattgctaataaaaacaatgggctggattggttatatgaatttgtgcttggggatgatgcaacaccttatgatgatttttatcgaggtattggtgctgtgattatgggagcacaaacatacgaatggataatgacaaattcaccggatgattggccatacaaaaatgttccggccttcgttctttctcatagggcgctgtcaacgcctgaagggttgaatatcatcataaccaatgaaacagtaagagttattgctgccaaggcgaagaaaatggctaatggtaaagatgtctggttagttgggggaggtaaaaccgctgcgtattttgctgaggctggtgaattacaacaaatattcttaaccacgattccggtatttttaggtgcgggcattgaggtttttcctgtgagtgaaaaagtccatgtcatacctaagacgcaacgttttttacgtagcggcgctattgaaagtttgctggatgttgatgctcctacccctaccccgtaaataagattgctgctgtcatgttcatctgtcctgtttttagctaaacaggttcaacactacagtcaaatggattgcccacattaattgcgccataatcgcgccatattagtggcacaaaagtggcgcgattatctgaattgcgccataatcgcgccatgttcttactgggatctgttgttcgccatgagtttaatgactgatatttatgaaactttgtgtattgcatcacaacctatgtctgtttcggatttattggtggagcatccctccgttcctagaaggactgttcaacgttggctggggcgacttgttgaaaataagaaagtacagatattgggtgaaggtcgaaatcgccgctatgttatcgctacggaggaaacatcagattcagtagcggatagatcggataatttcccgagctatattccactgtctgaagatagccaggatattcttcgttatattgatcaacccatcaaagcgaggacgcctgtcggttatcagcgagagtttctggaatcatatgagccgaatgtcacttattatctgtcggttccaattcgtaatcagctttggcgaattggagatacgaaacaaatctcacagccagcgggaacctatggtagagctatcttggatcgtttgctcattgatttatcgtgggcttcaagttatttggaaggaaacacttacagtcgattggatacggtgaagttgattgaatatggaaaaattgcggtaggaaaaaacgcgattgaaactcaaatgatcctaaaccataaagccgctattgaattacttgtcgatggtattgaggaacttgattttaatcgatataccgttctcaatttacacagtacattatctgaaaatttattatctaatcctgtctatgaaggacgtatccgtcaacatcaagttgaaataggaaaaagtgttttcagacctttatcgggtgaggcccatatcagtgaaattttggattcgttgctcgggaaagcacgagctatatcagatccatttgagcaatccttttttatgatgatccatttgccgtatttacagccttttgctgatgtcaataaacgaacttcccgcctggcagctaatttaccgttgattcgttcaaatctatgtccgttaacttttgtcgatgtaccggaagaggcatatagccgtgcaatgcttggtatttatgaaatgacccgagttgaattactacgagatctttatctatgggcttatgagcgttctgcccgagaatatttggctgtcacgcagggaataaccacaccagatccgttaagattacaatatcgaaatgtgattaagcagatcgtttatcgggtagttgccacgccagagatggattcaattgacgtgatagataaattaatttctgatgaattaagtcaatctgaacgtgacacgttaaaggcattagttattgaggaattacggcgattacatgaaggtgtgttggcaaggtatggtctccgacctttgcaatttgaaaaatggaagcgaaaacaccgatagtctttgtattgacgctattgaatggctgcatggtcataaaaaatttccggattaattacgtcattatcttagataagcgattaattagctcttttgttatgccgccgcattagggattaaacctatgcagataagaattaaaagcgatttgtggaataattgtaattgacatcgctaaacacccatcagtactttcatcttaccttggcctgacatcatatacgcagggttatcagtgtaaatgaacctttggtaaaacgggtatggaccttacatgtaattatctttatttatcatatagatgagtataggttggctacccggtcaaacggttccttggcactacgatgttactttaattctggcttaatgctcagagataggccaaaaattcgtctgtttagatagtgagtttttatacagaattatcctaaaaaaacagaaactagtatttttatgatctaaattttcgcattatgttctaaaaataggtaaaagagatgttcaagtaaggattttagatggaaatgccaatttattttcaatactggggtaaggcgaagcgagtcttagagattgatagtgccgattatcatctacttccttaccattgtttagatgttgctgcggtaggaatgcagttactctctttagaaagatcgttaactagagatcttgctagctttttagcgttatctacgcagcagttacgaagcatggtctcttttatattggctttgcacgatattggtaaatttgcctctgcttttcaaaaattacttcccggtttggcagtcggtctgcatcgaccagattgccccaaagagtatgatggccgttatttttgtcatgatcgtatagggttgtatttctgggaaaatatcaaagcagagttacttaatagactcgttaatattgaaggtgctgagcacagagaacagcgagagatgtttgataccttaatggtattcattgattgtgtattaggacatcacggccggccaattgataaaacaggctatagagcgattaaacattttactgaacctcataattttaatgctgccgccctctttgcacatcatttggttgaattatttcaacctgagtttcccattgaaaaattacaatccaaagagtggcgaaggcgactggaacaagtgagctggcagtttgctggtattgcaatattggcggattggattggttctgatagccattattttacgtatcaatctaaacctatgccgttaacagattattggaaacatgctcaagcaatggcaaaaaaagcggttatggcgataaatttagggagaccgccggtagtcaagccgtttatttctattcaggaatattacggttttgctgcaacaccattgcaacagtgggccgaatcaatacctgtagatgattctcctcagctatttattttagaagatgttactggagcgggtaaaacagaagcggcgcttgctcttacacatcgtttgatgcaggcaaaagccgctgatggtttttatttcggtttgcctacaatagcgtcttctaatgcaatatttagccggattgctcaacattaccagcaaatgctcttgacagaggatgacagtaaaccaaatatcgttttagctcatggtacgtgggggatgaataatcaatttcatgaacccgttttagcgttaggtcatccagatagaaacgatggtaaaacagatatcgctgcttcagcgcagtgtaatcaatggttagctgacccacgtaagcaggcactgttagcgcctgccggaatcggagcgattgatcaggctttattggctgtattaccaaggcgctatcaatcattaagattatttgggcttaatcgtaaagtattaatcgttgatgaggttcatgcggctgatgaatttatgtttaatttactggaaaatttattagcgctgcatctttatcagggcggttcagctgttttattgacagcaacattgacctttaaacagcgtcaacgtttaacggatatttggctaaatgttggcgggttgagttctcaattattgcaaaaaaatgattttcctttagcaaccaaaataagtttaaatgccatattgcccgttattgaacaaccgttatcaagccgaaaagatgttagccgggaaatcaaagttgatttcttaaatagcgttggcagttgtgttgaaaaggtattagccgccattgtacaagggcaatgtgtcgtttggatacgaaatacagtagatgatgctattgaggcttatcagacactgcgaagtttacttactgaacctgagcgttgtctgttatttcatagccagtttatattgcaacaccgaaaagagattgaagatcatgtattgactatttttgataaaaatagtcatggtgaattgcggcggggcaaagcattaattaccacacagatattccaggcgagtttagatactgatgccgatgtcatgatttcagatctttgccctattgatgatctcattcagcgagccgggcgcttgcatcgccatactcgcgatagtgatggtatttatcgatggggtattaaagattcacgtcctacacccatattgtttatccatgcgcctgaatggcgggagcaacctggatcagattggctaagccataattttcgtaacacacaatatgtttatcgctcgcctgtacgtttgtggttaaccatgcgcatattgagaaaactgggtgctatacgtatgcctgcggaaacacgccaattaattgatgcggtttatggtcatgcttatgagcaagcaccggaagtgttaaagtatcaagagaatgaattaattgatgaggagcgaagtcaggcagctaaagctaagtcttattggttacagtggcaattatatggttattgtgatcgaagtgctgatcattggtatgaggatgattcagatattaatgctcgctacagtgatattgaaactgttgaggtattattattgaaaaaaggggattcaggacaacttgtaccttgggtaaattcagccgaattttcagtgtcactgagtacgattaaattatccagaaataagtatgcggataaattagccccaattccaacaaaattaatacctgctctcaatgcattgcaacagagatattaccaagttagatatttgcaaccttggttgccagatcaagatccgaattttacttattcttcaacaataggcttttgtgaaagataaaagcaggaggtgttatgaacttagttcaggacccgtggttgccctttcggttgcgtgatggcagtgaaaaagtactgcccattaatgcgatatgtgatcatgatgttatggactttgctttaccgcgagctgattttcaaggagcagcttgccaatttgccattggtttattacaaaccgtttttgcgccggaagataaatatcaatggcatgctctctatgaaacatcacctgataagaaggtattacaacaaaattttaataaagtgatacatgcttttaatgttaccggtatagggcctctttttatgcaggattttgatccgctgcaaacagtaaaatcaaccactgtagctggattgttaattgaagcaccgggagcgaatggtttaagactgaatacggatcatttcattaaacgtggcatcggagatgtgatgtctcttgaaatggcgactttggcactgtttaccttacaaattaatgcaccgtcaggaggggtgggacatcgagtcggattacgaggtgggggaccattaaccacgttagtggtgccgcaacaaaccgatgccacattatggcaaaaactgtggttaaacgttattagtcgaagtgaatggcattattcagaacctgatttaaccagtgctcaggtttttccctggttagcgccaacaaaagtgagtgttaatgaagggacagaaattcatgctacggatgtgcatcccttacatatgtattgggcaatgccgagacgtatacgtcttatagtggaaaagggtgagaatatttgcaaaatttcaggtaaatattctgagttcactgtctctgaatatcgggcacaaaactatggcggcaattataccggtaattggagccatccgttaacgccctataaatgggatcctaaaaaactaacaccacccttatcgattaaaggccaaccgggaggggtgacatataaaatttgggatgctttagtctttaccagccatgagagtggacagcgttgtgcgccggttgtaagccatttttactctttatgttgtcattttgctgaactccgaagggtaatgcctcgtctgtgggtgtttggctacgatatggataatatgaaagcacgttgttggtattctgtcactgtgccgttgttttttgtcttatttgaacaacaggaaaagattctatatcaagtcaaagagctacaaaagctggcaatcaatatgatttggctatgccggaatcaaataaaagcggcttggtttgaaaagcccgttgatgtgaaaggagacacttcctttattgacctgactttttggcaacaaagtgaatcgctatttttttctgtggtgcatcaacttatcgataatgcaaattccgatgcgccgtttctgacaccagaacaggccaaacattggctcaataccttgcgttatctctgtagagatttatttgatgaatatgttgctttatctgaattaggaaatgagcgttcaatagcgaaacgtatgaaagcgcgtcagcagttaattatcgggttatatggacaaaaagcgttaaaagagatcaaaacatttatcactaatcatcatattcactccgggaaagaggaggtgtaatggacagtaagagtgaaatcatattattgcattggtggcaaagtatgtttatgtcaccaaaacagctaaaagagaaaggtattattccagccccttctacttatagagctcagttaaagcgctgtgacagtgttgagatggctatgttaactgaaggctttcgggctttatggctcagcttacctgatgaaattagtttgtcggataatccgataaaattggaatattgggccacgatggcggtggcattagttcatgttaaaaacaacagtgatatcaaattggcggtagcggcgggtaagaaaggaggaggaaataaaccggtggtcagtgaattaagattttcacaattacaaaatgctaaaacaccgaatgaattattacgtcgattatgtcgggttttacagcaaatcaaaggcaatatttctgttttggctttagcgcgggatattgaggagtggtttgctgaatatgagcaattacgaccatgcaaggcggataggcgtatcaaagtgaggtggggtatggattattaccgtgctgctagtggtaaatcggttgatttatcggattttcattaattgagtttaggatgattattatgagtcagtttattcaattacacctattaacttcctatgcgccatctaatctgaatcgtgatgatttaggccggcctaagacagcgaaaatgggcggttttgaacgtttacgtgtgagttctcaaagtttaaaacgtcactggcgtacttctgaattgtttgaacaggtgctatcagagaatattggtattcgcaccaagcgactgggtatcaaggtatttgaagcgttgatcaaggctggagtgaaagaaaaatcggctagagcattggctatgactattgctggtgtttttggcaaaacgaaaaaagatgctttagaaattgaacaattggcgcatatcagcccggaagagcaacaatctgttatgtcgttgattgcggtgctggcggaagaaaaccgggcaccaacgcctgaagagcttaatttattaaaaactaagcaaaccgcggtggatattgctttatttggtcggatgttagcttcaagtccggcatttaacgtcgaggctgcctgtcaggtcgctcatgctattagtgtacatagtgtggttattgaagatgattattttacagcggtggatgatttaaatgatggtaaggaagatacgggatcggcccatataggggaattgggttttgccgccgcgctgttttacagttatatctgcattaataaaacgcaattaataaaaaatttggatggtgatgaagccctggctaataaagcgattaaagcattaacagaagccgctgtgaaagtatcgcctgcgggtaaacaaaatagttttgcttctcgtgcttatgccagttttgctctcattgagaaaggcgagcaacaacctcgttctttatctgttgcatttttaaagcctattaatgacagcgaccagggctcatcggcaattaatgcattagaaagccaaatgcgcaatattgatctggtttacggtacttgtgccgatgaccgctataaattcaacacattcactggggaaggaactttggccgaactgcttgaatttgctgcacagtaatgggggcaaaatgaaagcatatttagtcttccgattatatggcccgatggcaagttggggacaacctgcggttgggggagaaaggccaacggaattgtatcctggtcgctcggcgattttggggttattaggcgcagcgctaggtattcaacgagataatgagtctgaattagcaaaattacaaaaaagtgtgttaattgccattaagcagaccgttcccggctctttaatgcgtgattatcatacgacgcaggtgccgacgcacaataataatgtggttcatcagaaccgtaaaagtgaattaaggtcagataaacttaataccatactgtctaatcgtgattatcgttgtgatggtatttggatcgttgctattacattaactgaacacgcttgttttacgcttgaacgattccgggatgctttacttaagcccgtatttatcttgcatcttggacgtaaatcttgcccgcttgctttgcctctcagccctaaactcattacgtcatcggcattaaaaatggcattggatatctcttttccaccgctgattcattctgatagcgaagataagttatggctaggtgcaaacggtattgtgacttatttttgggagggaaataaagatgaaattatctcttcaaatattttaatcagtcatccttgggatgagccgattaaccgggggcgttggcaattccggcaacgtactatgtatcaactttctatcgaggagggtgttgatgtatttgtctaaaattgtgcttcggcaatcgagtcaaacagcaaatatattagcaaaattgagtgcaaatggcgtttatacttctcatcaattgttatggaaattgttttcaacagacgaaaaacggcaatttctatttcgggaagagatcggaataatgggattacctgtattctatgttttatctaaaacctcgcctcaaactgagtcaccattgtttgaggtggaaacgaaagcattttatcctcaattgaaggaggggcagcgtttagctttcaaattgcgcgttaatccaacgatctgtattactgatccttctggaaaacgtcagcgtcatgatgtcttgatgcatgctaagtttcaggcaaaacagcaaggtgaaacggaacaggggaaaataaaagctatgatggagaatgctgcccgtaattggctgttaaaccatcgtcgtatgcagcagtggggtattcagtttgacaatttactggatattgaaggttatactcagcatcgaagtgtaaaaaagcaggggcaaaaaatacaattttccagtgtagattttcaagggcttctgacgattaccaatggtgagctatatttggaacagtatgcaaaaggctttggtcgtgctaaagcgatgggatgcggattgatgttaatcagaacagtataatggcatggatgtcatttaaatttatttttgttgaagatcgtaatgcaatattctttgttgtatgaggatattgatgttaaaggtagcaaattcgctgttgttaggcgttcgtgttatgcttcaaaagcatggtaaaaagtgatattgctaactaatatcatcctgtagagtaaggcgtagttgttactcttggaaatattgataaaataattaccgtgttcctcacctctgtggggatgaccctgaattttggtatacatttgtacagggaagaatatgtttcctgtgtttaatgggataaaccgctataattaatggtaggatatcggtgtcactgagtgttcctggtcattaccggggtaaaccaaactcgataaatcttgtcaaagagagaatttaagtgttccctgtatttgcggggataaaccacggcatgagtgatgctttactatgttcgctaaatgttccctgtacttacggggatggacctagcagtgcgccaaatagttataaagctaaggatgtgttccctgtattgtactcatggggataaaccgtacgaaaatgacactgatcattggcttccttggtgttccctacctctacggggataaaccggacagtaacagtgatgtagtcggtagtaattggtgtgttccttgtgcccacggggtgaaccgaactgatactgttgtgttttgggtttggaagcgtgttccctgtattaacggggataaaccgaacagttagcgttttagctggcagagatggacttgttccccgtttttacgggggtaaaccgctaaatacagaactatctccatttgttgtcatttgatccccgtaatctacggggatcaaccgtcatccggaagggtaattgacatagggggggcagtgttccttgaatttatggggataaaccagattcaggtttcatgatgatagttgaagtagaaatgctccccgtttttacggggatatgatgattgtgttattgattatattgctatttctctctcagatttcaataaacctttgggaagggaattcattcccttgccgtcgcgatgcatcttgaaatccataggggagggtatagaacattccaaggtattataattcagatagttggagcagttactgtgtatcaaatttttccgttcaatgcataatgtaaaaactttccttgaatagacttttcctgcggtgatttcttgtaaacctgataattatccgtataccaaaaagtaattttaaatcgcgacaatctattaactaacttattgagtcatgactccaatgtgttgattttttattcatgcttaatggaaatccatgaaaaatattattataattctttggagtcataatcagtaaaataacaaagcatagcttgttgctttatatttttaaattaataaattcattaaaagctattaaaaataaaattcaagatagatactttagttacttcactaaatattcttacatgaaaatattaaaaaatataaccaatgtataattttgggggttcccccccaagaattacgtaataaatttaaaagagatatttctacattaaccaacagtttatcaattgctaaagaatatattagtaactactaaactaatacttctactgcatttgtttgacttaggaaattatttggacttgcgcttaaaccataagcaccagattgaaaaattaccactaaatcccctggagttgctactgacatatctccttgatgaacaagaatatctagtggagtacagagtggaccaactatattcactgtttcacgtttctctcctttaattttattaccaatgattgcaggatagtttcttcttattaattgccccaaatttcctgatgcagatagatggtgattcattccaccatctgtaactaaaaaagtcatatcgtgggaaattttgcgttcaacaattttagtaacataaattccagatgaagcaactaaataacggcctaattccaaaataatttccacttccggtaaaaatttctctgcacgctctactagtttgtgcattgcattgcccacttcggtaatattcagttctgtatttccctgaaaataaggaactccaaaaccacctcctagattaaagcgacgtactggagatggagcagaatgtgataactcaattactaaattaagagccttattttgtgcttcaatcaaatgttctgcgcataaattttgtgagccagggtaaatctggaatccttcaaaaactagggaatctggataatcacgtatgaacattagtgcttcgggtacataaactacatccataccaaactggcgtggtcctcctcccatcttcatgccggaagagttaagattataatcagggtttatgcgtaaagaaacacgtgcacataagccaagtttttcagacaatatttgaattcgccgtaattcatttaacgattcgacatttaacaatacctgtgcagcaattgctctttttaattctgtatctgttttacccggccctgcaaaactaatatcttcaggagaaacgcctgtatttagagctaatgccatctcatttgcagatgcgacatcaaacccttcaattttttgggacaaatggtggataagcggtacgaaaggatttgctttaattgcataatgaatactaattttttcaggtaaatatttacgtaatagacacacttgttggtcaatatgttttctagaataggcaaaaaaaggagtctgtcctatttgagtttccagtcgggttaatggtattcctcctatttccaaacaatcgtctttaatgacaaatgtttctgcgattttcatcgataaacttttctgtgttattctattttctatattcataatttacctcacattaggaaaagacagcattagtatatatatacccgttatctttcaagttgcttctttgttggctgcactcgctcaccccggtcacatagttatctatgctcccggggattcactcctttgccgtcgcgatccatcttgaaatccatagggtataatccaccaacagaattataaaattcttatgaatggagttaatctctggtatttttaaaattatacccccatctatttccatagaaataaaaatacatttgtttgattaaaaaacaaagggtatctccataataattaactatagcctacagtttttacatccagaactggttaatcacgaataaagcaataaagaggcaccaaatagaccacctactccggcagaaatcagcaaaatgttatctcctgaatgtaatgctccactattttttaacgcatgtaaattaataagcatatcggcaccaaagcaatgtgctgtttcactaatatttttaagaaatatcttctctataggaatattcataaactttgctgcttgacgccatatcaaaatattcacattatgtggaataatatacgatatatcatccatcgtaatatccgcctgctgtaatacatcttgaattacagattgtaatctgagttgataattcgctgtgaaatctcgataagcagcagaattagttggtaaccaaataccttgagaatattttgggtaagtatgtatagaatgtgcaagaatgcttgaaccttgaccgttcagagagagcaaagcggcggcggaggcatcaccgattaccgctacattaggtactattctgagttcaaaactgtcagcaatttccccgacaactatcagagctttactgttaggaagcgcattttgtaaataatgttttgctaaagataatgcggaaaatatggatacacaattgttgctgctagttcctatagcaacagcattaggtagttgtaggcaccgaacaagtaatgaagccatattttgaccccatacactacttatagtccccgtatgagcataaaccagcagtacgacttcttgcttaatgtggggaacttgttgaaataattccttgcagggttttagcagcatttcttcttcactgccttcctctaccggacaatgagttaattcatacatacggctaaacacccgcgcttcattttgggttaaacctaagcgttggtattcccgttcaaccttaagcctcttttgaggtacatagctagtaattgtctctaatgtcatcatatgaattatttactccatctggcatgtaaatcgacacaataagcaccggatactgggctaaaactatgaacttttccttgataactcaattcattgtaattattaaaagacgtaattagttcattacattcatcgggtaaacaaggatctaacaatgccatacgatccaagaagtttagttgttgcacatccgtcaccctggctccaggattttcctccagtaatattccccagctatcccatatcaatggttcatatccagccagtgaagctaagtctaaaaagaataaattacgtactatccattgcccatatccatcatcaaatcgatatccactgaaaatacgctcattcattgttccctgtcggatatgcctccatatttctgctccactaaagaataaatgtcgaggaaaatctgatggattagcccccaataatggcttagacaaaaaatttaatcgactttcggcatataaccatctagtaccattccaatattctactaaagtatgatcatgcatcggacattcatcgttatactgataatgtgcaaatccatagcggactcttgccggaatatttttatgtcgcataaaggaacataataaaaccgaaaaatcccgacaagtagataatagacgtttttctgggggccgaggatttgaaaaacttgaatcatcaagtaacaaaagtttttttagcatcagtgaaacacagcggctatctatttctgtattgcgcatagaaatgatatctggattaagtttatctttttctgtctgatagtgaatcaataaattctgaacaatagaaattaacccttccacatcattaggtaaatcatcaagctgagatgaatatgatgctgctaatgttacctcagtatgctgccggtagtgattaataggatcaagcatgaatcggttcccttggcaaagatataatttcctctgtgttaaatggtgttataaaagctgaaatatagttcattattttataatgcaactcttttcttggtacataatcaccaccactaacgactgaatttaatgctttcaataaaggagaaaattcataaacaaaagcgtaatgaccagctccaaagaggatatgatgttcaacgtggggcaagtgcgttgcgtagtcagtcggtgatcctagcaacttcatagtatctctttcacctgataaaattaaagtcggtaaaagcatctcatttagagtattagcgagaaacaaatttgacaaagctggggctagtaagatcacagcacaaatacccttaactaaacattgctcaactgcaaaacacgatagttcattgagtactgatgaaagttcgggttccagttcaaaacagggctgacaaccgcacatcactaatacatcatacgctccagcagaatggcctatcaccaatggacgcgaaaagtctattctctcgcctagggcctctaaaagtaacgcatcacatgcatacactaaacgttgaggtctggttgtcaaattcatccaacgatagcgagcatcctgaatatcttgatgatccacggctaacacagcaaaaccttgtgttgataaaaactcagcaaggtatgattgatcaaaacaagaaccaccagaaccatgagaaattactattaatggccaatttgttcccatggggatcgcactttcttctgattttgcatgtaatatatttcggtatcgttttacggtaccactccctgcatatgcaggataccagagagtagcagaaatagttcctaatgaagatagccaattgtaatgcattactccactaccaatgatgtgcaatatatcattgactctatttagcatttgaataagtctccattttattgccatttcttagtaaaatgattaaattccatgccaaaaacaaaaagttttttctactaatgttatttttaccaactttatacgatactcttcttattaagttatagatatcattcattttatttatatttcctacactacagtataagtttaattccattaagaaatatttttactttctttctatatcatttaagcgtgaagatgcaggcttctaacctcataattatattatttaaaataaatcgcatgtgaaaccagcatctaaaagtagaatgagtatataattaatggatactgatttttttaaattgaatttttattccataagttgagtactgatcattaagaagacactctaccttcagcaagctttgtctttaattgcttatagtctgtttttccattacgatttttaggaatagcccctatcactaatcttgttggccacatacttctgggcataagctgttgacatattttacgtagctctagattagatttttcatgccaagaaataaaaaacactaatccttcaacacagttccctgctataacaggccagccaataaccgcaatatcgtcaacccctactgctttactcagcattgactcaatttccaaacgctccaaacgctgaccattgactttcagttgatcatcacaacgccctaaaaaatgaaatatcccatcattgtcacgtttaacccagtctccagtacgataccaataacaactaccatcatattcgaaattatcagcctgcatagtgttacttgataagtaaccactaaccacttgctcaccgccaatccataattcaccttctcctacatcccctgcgttttgacgctggcgtccaatctttaactttgtaccaggataaggagttccgattggaacaatcaattcattagtttctgtcggctcaggactccagcgataaccacaaattgcaactgttgcttctgttggtccataaatattatcaatatgtgatgcaggtgcagccatatgccagcttttagccatgctctgtaacaaaggttctccacaaaacaacgattggcgtaaattaggaaaagaaccaggttccaattgtcgtgagcgctgaaagtacaaaataatagaaggcactgatgcccaaaatgtcagatgtttatctcgaacaaacgttccaagcattaaactgtttttggcatcaaaaacatgagtcgatgctccaatagcccaaggaacaaataaatcatggacggaaacatcaaaacccagaggacaaatttgagaaaaacgatcagcgcaggttggttgatacagagctatagtattggacacgtagcgtgtaacattcgtatgtgcaacttcaacccctttaggattacctgtactacctgatgtaaacatcaaatatgcaccaggattatctgtcttcatttgtgcagtaggaatcttggctaaatcagcatgcgcgagaaaatagtgtcttgggtaatcgttacaccaattggggcgttgtttactatctgacaaaattatgactaacggtttgtctatatgtttcaacaaatcgtgcaataacttttgctcctcagcacaagtcaccaataaatcaaaatcagtaattttagataataaactcaggctttcaggtgtctggtcttcgtttaatggcaaataagtcttaccgtaacacaatgaagctacaatacctgcgaaaattcctacgtttctttttccaagcaaagcacaatattttccctgcgaaagagagaaacctcgggccagaagggatgctaactcatgtagctcacggtaactatatacatcattattaatagataacgcttggtaatctgcatatttcagtgcgctatcatgcagccattcacctaagtgttcaaaaactctcatgatttaatgtcctctttaactaattgaaaaatagcagcaccgaatactgcccctaatcctacagtggcaaccattacataatctcctaatcgcagtgtatctctagcaaaatgccagttgataaagatatctgccccaaaacagtgacctaattcaggtaatttatccaagtaaactttgctcagaggtaacgcgattttttgggttgcatcacgccatgaaatcaagttcacattatgggggaaaacccaacggatatgttcccaagacaaattagattgttttaaacagcgctccattacattggctaggcgtccagcatagtgggtttcaaatcgcacttgctcttctgcggtttgccaggagcctttagaatgttgtccatagtaatcaatctctaaggctttcattttggctccatcaccccccagactaattatgcaagctgtagcggcatcgccacacaacgtagtattgggaatttgttgtagaataccgctaaaagttaggtcagctgtcagcaataatgcataaccttgaccactgtttccaattagatgattttgaattacctgcaatccattaagattagaagcacagttattcgaatgaatggagaagcaagttgcattacgcagccccaatcgccggttcaacctagacagcaaattatttggataagtccaagtttctggagcagtatgggcatgaataagtaaagtaatagattctattgctataccattacgtgtcagcgtatcttgagctgcccgatacatcatctcttccagagatatcttactgatagctatgtgatttaatccataaaaacgctgatatatcttgattgcatcttcagataattgaggctcaataggaactcgttctaatccaattttctgttctggcaaataaacaccaatgtcattgattattagactcacgatgtggctccactcgtttttttatgtacaaagatataaagcgaaggtagcaggaaaagggtgaggcatgaacctactaacattcccatgataatcactaggcccagttcaaaacgggattctgctgctggaccgctggcaaataaaagaggtaaggctcccaatatcatagtcagcgtagttagaacaattgcacgtaagcgagacgcagaagcccgcactgttgcgtagtaaatactaataccacctttcttgtgcaagctatcagtagcttgcaccattaaaattccttgcttactgatcaacccaaccagagtcagcatgccaacttgtgtaaacatatcaagtggcacatcaaaccaagataacgctagtaatgcacctagtactgaaaaaggaatgctacccagtaaaacaatgagtggccccagataattagtaagttgtaatgctaatagacaataaatacctactaatgctatagcaaaagttactagtaaacgctgtccttcttctttgctttgtcgtgtttctcctgataggtcatatgacactccttgtgatttgaggttgtggagtagctgaagagcaaactctgttgcttctgattgccctactcccggggctaacacaccttgtagtgtcacagcagcttgtttttggaatgtatttagagattcaggacctacttcaggattctgagtcaccagacttcctagtctgataagattgccatctaaacttcgcacttgtagatctaatagtgattgtatcgcagcccgttcagtttttttcaaggccatgatgacgttataggtccgtccttcataaatgaaaggttgtagtttagtattggcgtatgccaaattcatactataaccaacatctgaagcggaaatccctactttcgccagttgttcacgatctagtcgtatgtgaatctgcggagtatcatatttcaaatcttttttcaaaaatagaaacagaccactagcacgcatttcacgtagcattagatcactaagcgcatctagattagcgtaatctttatcttcatgtttgagcacaaattggaaaggtaatcctccgacacctggcaaggaagaaggcaggattactaccgactgtaacgccgggattttagctataatattctgcaattctggttgtaattgtattgttgaacgttgacgttcagaccaattaattaatcgaacaaaagaaagtagttggttgtcttttggtacgcctatgacatagttaaaattagctatttccggtaaggtactataaatattctctaatataggtgtatgttgctcaatatagtctgttcctatgacactggggccttctgcaattaccattaagcttccctgatcttctttgggagccaacgcatgaggtaatataatgaacaaaatgattacaccagctaacgtagttgcccataaccatagtgggaaatttccagttttcactagccggattaaaacacgctcatagctgcgacggaggcgagcaaacattttttccactcgtatcaccatcagtgaatgttgatgatttgttgatagcatacgtgcgcacatgacgggagttaagctaagtgctaatatcccagagataatgacagctccggcaagagtcactgcaaattcagaaaacagctttcctacaattccaccaataaatgctaatggtaaatatacgattgctagagttaaagtcatggtgactagagatgtagcaatttcattccctccttttaacgcagcctgataaggagtatctcccattcgcattcgatgtagagcaatgtctaacacaattatggcatcatcgactaccagccctgtggctagaaccattgctagcaaggtcagtgtattaattgaaaaaccacacaaatgaataactaagcacacaccaatcaaagagagtggaatagcaataactgggatcacaacagctcgtaatgttcctgctcccaaaaatattactagggtaacagcacagcaagtaagtaaaatagtgataaaaacttcatgtaccgcaccaccaatatattcactactgtcgataagcacgttagactgtagatcataaggaaaactggatttcaattcccctatagttttatatatatcatcagcagccaacaagggattactaccttgttgccagttgatcaatactattgtggcgggtttaccgttaaaaatagatttaatttccggctgactacctcctaattctatgtcagctacatcctttagacgaaccggagatatatttgttgcggtcataatagataaattagcaaaatcacttattgttgaaagccctgtttctggcacaagttgaaaacgtaatttactatcatgtaaagcaccgccattcgcttgagcattctccaattttaaacttttgctgatatctattgcggttacaccgtggcgttccatacgctctggatctaaccaaattctcattgcatattcactacccaatatttctacattccccactccttttaaggattccaagcgtggtttaacaactcggtgcaaaaaatccgatacctgcgcagcttgcattgtttcactagtaaatgataatgcgaaatcaggaactcgatccgcttcttggcgggagatttgcggtgattccatatcatcgggaaaatgagatatggtattgactcgttccatgatattagttaataccttctgagtatcactacccattgccaaatgcaatactaccttgctacgcccagtttctgaagtgctggtaacgtagttaatatcatcaattccagatactgccgataatacttctgacgtaacacgcccatccattagatctgccgaggcaccaggataaaaagcactgacactaattgcatctgcatctacacttggataaaggcctactggtagataccctatagaaaacaagccagcaataaataacaaaccactaaatgttgttactatgattggacgacgtaaaaaaaggccgataattttcattggtgggtttcctgacgaataggagcatctgggtatagacgcatttgcccggccgttaccactaattcacctttttctaaccctttctttacttgaacaacgccctcattatcgtctccagtaacaatagagcgaatctggactcgattgtcttttactacaaatactgattgcccataggcactataacgtacagaaactttgggtattactcgtgtcatctgaggagcactcgcaggataagtcaccctaacgctagcgccgtgacgaaaatggcctttttccaatttagctcgtaacgttagagttctgttgataggatttatttcagtattgaccaatgtaatgttagctataccagtaaagccagcgacagtatcatttacattaatttggacaccaggtgacagagctctaatatcagtttcagggatactaaattcaacatataaatcatttggatcataaaaagaaaataatgtttggccttcctgaatcaattgtcctggcgtcaaatcatgtaaactagcaactccagtaaatggcgctgtaaccatcattttacgcaatgtatttttaaatttttctacttcactgacagcatgagctaagttaacgtgctcagcctgttgagcagcttgtgagattgccttattcaccagcaaatcggcacgcttagtatttttctgggtcatatctaagtgagcttctttttccttaagctgaaaacgctcaacgcggtcgtcaaaatgatacaataccccattgattggtacctgccctccggcaggtgcaatttgcaaaatggtcccagatatttcagctcgaacagagagatagcgtattgacttaactgtagcaataacactttttctatcttgccaattcattgaagtgacttgcgctgtttcaaccaagattggctgtggtcctttttgtgtaacagatattttgctatctttctcctcagtactattaagtccccgaacagcaaccacgttgatagaaattcccgcaaaaataactgctacaatagcacaagatgtcaatatcacatgatggcgtttcatgcgaaccgctcctgaattatagattggtacctttgacgtaattgatgtttatcaaactttccatttgcattttttggtaaccgagatagttgtataaaaacactgggtatttggtgcagttctaataaattagaacaaaaatgttttaaatcagattctaatagtttctcttgtgtctgagttgccacaaaagcaataatactatcttcagagctttcttcaccagaatgtacaataactgcggcttctataatagagtcatggccaaacaaaactttttcaatttcactgaaaatcactttgcggccacggatttttgcaacttcatccatacgaccaacgaaataaaaatacccctcttcatctagccaaccatagtcaccagaatatagacaacgatccccataaataggatgtatgccaattcttttttctgttgcttcggaattgcgccaatatccttgcattacggtttctccgcgaattaataactgtccaatttcgcctgctgtacagggttgattattatcatctaccaccataatttgagtatttgggatagcaatccctacgctatctggcttgcggtctagatcatctggaggaagatacgtacaacgtttacattctgttagtccatacatagaaaatattttggctgtagggaatagtcttttaatcattgacacatgctgcttacgcaaagccatacctgtattggagacaaggcgtatagaactcaaatcaaaagaacctttactagcataaatatcaagtaaactatacagtgatgatagcccaggcataattgtgcaacggtattgttgaatatgccttaatactactggtggaggcgtattatttgactcaagcaccactgttcccccaacaaaaaatgctaaaattatctgatatagtccgtaatcaaaggcaatcggtaatactgccattaccgtatcatcgtggtggtattctaaataatttaccagagaccgtgtagctgccatcatattttggtgacttaacataacccctttcggttcaccagtagaacctgaagtataaataatagaagccaaatcaacactaattgcctgaagtggaatattagcttcagaaattggatcggaaataaaatcatcaaaattaattaaattattttcagcatatatattctcaactttatcaataatcaaattaatatttgaaaaataaaaataatcatattttagtaatgtcgcagcaattattgaagaagtgaagaaaaaactagctccactgttgtttaaaataaatttaattttttcttctggtgtatcaaatgctatgatagatggacaggcacctaatttttgtgcagcaaaaaatatagcaatagagtttatatgatttcctaaacaaattactactttgtctccttgttgtagtccattcagtcgcatacctgctgcaatagcacatatttgcctccatatatctttataagtataattctgattgttgaaaattaaagctgttttttggggatatgccatttcagcatctctaataatctcaaccaaattataattcatgtaatcatcctgataattaaattaattaagagtgtatatcaccggaagagtatttaatattaaaatcgctttttttattaaaaatactaaaaatgtaaagcgcagaaatccaattaaaaatagcaatagttagatacaaccgtgtagcatcctcctgctttaatcctaataatgcagcgattccaatctccagagaatataaggtgatattgataagtagtacacgtaatccttgaccaatctgctctaaagcagtcattaaccccaatactatgcctaagctaaaataagatggagatacacaatttaaatagcgtaaagccgcctcagcaatcagttcatctaaagtaaaaaatttaactaaccaaactttcaaaaagaatacagcaacactaataaatatatatataacaccagtgagactaagaccaatcaaaaatacttggttagctctgacaaaattccgtttagataaagaattattatagtgaattgccatagctgttcctaaggcaatagcaggcaaaataataaacgactgtatacgaaaagctatgctaaaccctgctatttcatgggcatcataaaaagacaccagataattaaaggaaaataaaaaaataaaaacaagggagaaactacccattacgggtaaggccatcgtagatatatcttttattacttgaataacttgatcacgcattcctaaccaagatataaccacgccttgacgatagagtaaaatactgcctactgaaataagatagctgctaccaaaaattgccccccaaatcaggctttgtaagcccttatgccaatatatttcagttaagtaagttgcacctatatttagtactgtacctgatattcctagtaaacttccacaacgattaaatccaagaccaaataaagtggataaaattaacgtggcaaaaccaatcattatcccaataaaaagcataggaataataaaattcattacttcatcttgctgtgaagattcaatatgaaacaaataagaaataccactttgaaaataccatacattgaatataagtattgccatcaatgctaacatagctaaaaacaacaataacaaccgttgtcctagtagagaaaaattagcacttcttaaatgtgaactataccgcaatgcaggtacacgcaatccttcatggatggacatcatcatataattaagcggtaagaataatccaattacatataacatattaggtgaattatgactaataatgctaatgttgattaacacagcaaccgcagaaactaccatagtgccccaaagtgtaatgctggtattccaaagatcactgagtaatttcaaccactgatatcgctgaaaatgtctccgctgaaatatggattgcattgtcatatcaattaccaatttatttaatatattcaataaactatatagatccagctaaaatatttagacgctgcatatccagacttccttccatccattcatatccttgaatgtcagtaattgtcttctgtaaccagatatctgttagaaagagctctgttcccacaagctgtggcatgatatgaacaactttttccacaaactcggtagaacaagctttggccagtgaaacagctgcaccatccaatatgtcatcatctattctcgaagcggcacggtaattcagatttcttatggcttcaatttcaatctgcaaggaggagtggagctctctagcttttacatttcttatatgcgatatggcaaaatcaagtagtgattgagcactacctaacgccatagcacatacacaaggcctcatacgataaaaagtttttatcactgagtgcatacctctctctaatggtctacggtgcaagcccaaaatatgctcttcagagataggaattttgtcaaaatataggtggcttaagccagcaccttgcagtccagcaacaggtagcaactgacgaaaaactttaggatgagaaagggtttcaggtgtcaacaaaattacaccgatactgtatggccctgttccagttctgacaaccattgttccgatcgtagcatcgagtccattacctactagccatttttcagcgttaagttcaaaattatcactcaacaatgaagacggatttcctgcatcagagcctttgccaggctccgtgactgccatacaggtgcgagctttatgctgagcaacatattcaaaaaaatagtcttgttgtttagttgagcctaattctcgtacaatgataccggaaagagatgggcctggacatgacagcaggacatttggatctccgtaagtaagcacctcatacatttttgtcctttccagacagctactactgcgatccatataaagttggtcgaaaagcggtgcgtcaagatgtgataatacagtatccttatcatctagcaccttcaaagacaaagagcgaaatagttgagctaactctaaccatttttttccataatgtgtacaggcaatagaactgtcaaaattaaccatggaactccctcagataaacttgattcagaacagaaaaaatgtgctgcatttcgaccaacccttgctgtagaagagcccttcctcccgttgttttaatcaggatattaaccatttcttcaatttcttcagccgcatgctcagcaaactgtgaaggtatttcttcttttatgtctcctacacactgagataataataattgacgttgtataacttgtgccaaacggagacgaatagaggaaattgataatagagaaacactgccaatcttacgctgggctgtatgatcaagtaaaatcgatgtccatcgttcaatccaaataagctgcattcgtatcatttcacattgatagttgacatattttttcgctatctcttgtgaagcaatatcaccgtcttttacctccaatttgcataataataatctctggcgcttcatactattacagacaggaaggatggtgacagtatttctttctttccagctatattgtttttcgtctaaaaagcataattctgaatttttccattgttcttctgaaactacagcaaacccgtttctcacaacaatttggtttgatgtagagaaaactgtttgggctaattgttccatcaaccagtgaaaacgttgttctttctttgattcgaatggatagctgatattaaacatgattatattcctaaattttttgtaagacagaccatgctattcttaaactttccatatcatgttctactaataatatgttccttctatttagtggtgttagtgtcttatccgctagaagtaacaatgcattcattcctgtaacttcaggtttgaagaaagcaaatttgattgaactttttctatcttccgcttccatttgaaaacgtatttttttaaagaaataacctgtacgctctgttaataatatagtatcttcttcatctaactgcaattgatgcaatatatttcttaacatgccaaaggcatccaaactttcagccgactcccattcacttacctgccctgtttttaataatatccatttattttcatcgcttttttctgttgtgagtaaggctgcaatagcacaagattgcgttggtattggaaatccgttagaaatattacgaggaatagtattttgctccattcctaataataatattttactcgcactaccactagataaataattaccagcaatacttaaagctgtggttgataccaaacttccattgtcacaaatgtcgaatgagtatcctttaaggttataatggtccataaaatatggaccaaaagctgaatgatctggatcaaactcaggtgtccaataggcaaatatagataaatcaatatcacttaaaagaatagaatcttccatttttttaagaacagaatcgcctaattcagtataagagtattgatcaccttctaatagggttgaatcagttaattcatcttgagaaatacgatgtaagtctttctggtatatggagtaacggtttcttggagtttttctgagagatctcttattcattatttcgcagaaaacctgatttatgtaaatcatgtcatgatacactatttagtcgttctaaaacataatcacagacagaaccaatactttgtacatgactggcttccaatgtatttgcatcaatcataaaatttggaacattatcctctagtgacatcaaaaatgtcagtgtagtcatcgaatctagcccaagctcatcacgtaatgatgttgattcactcatgtcattaagagagccgacatttaattctttcgtcaaaatgtttttaatcataaaaaagatttctgatttattcattatgtttcaccaatttgtagttaatattaaaatgatatcttagggcgtttttaaataggaaaataccatagttcatgaagaaacatataattcccatcattaaaaatattttatttctaaatttagatattccaatgaagttcataaactcctgccctctttcttatagaaaaaagaacacttggcaaaggagtaatcaactaataatcatatgcattgataatactcaataatattaataacgtcaataaaatttcataattacaccatgtcggaattaaataaaggttataacaaaaaaaattaataaaaaatccaaaatataacaaaaaattagctgtattaaccttttatttaatttaaataaaataaatcaccattatgataaaaaaacatttaattcattcaggatagagaacatatcatggcgaaaaagcataagattatgatttataagtaaatttaccgtaattaatgaaaagcaaaataatcaataataggtacataaacataatggaaaattattaattaacaataaaataaatcacattatcatataaatgaggcaccttggtggtgaataaaaaataaacaaaaagaacaatatcaaaattaaatcaaaataaataataacggtataaaagataaagataggaatcagtaattattatagctcccgttctatatgtgactttttagccaatatcacatctcttcgggataacaacggggtaatttactggccgataataaatctgcggttcgggcatgctgctgtatccatgactgatcactgcggtaagcccaaccccaactgttatcgctcagagtatgactatcaagcagatgaccaattactgacagacagcctgacttgggctgaactagccagggactttgcgccagcagtgtattgctgtatagcggaaaagcctgctctacccagtcattgctataaataaaagagcgccacggggttaggtttcgcgagtgaattgagcataaagaaaatagatgggaaaaattaattcaaatcaagcacccagttcgtcatagtggttcatctgaaatttttcccaatgatgatagagttatcccatggttaaattcattcccaatcccacaagagatgataacgatctcgtgaccagcgataatagagcgctagaaaagcattaatattgttaatgggaaattgttcgaagtcgaaatcttcatcttcatctaactcaagtaattcacttatccattgtcgcatttctgtatattcctcatggtcaggatcattcagtattgcgattaaattttcataaccatcaatcccgccggtatcctcaaaggggcaagcgcgggcgccatccagacaataaaaaggaagcgggaggtcatttgcaggatattgactgttttctaaaataatttcgtgttcccaaccatcgccaaaatcatagagataagtaaaagatcgccctttttgtttaatcagatcaattaggcgatataaatcttcttccttgctatcagacgggctttctggcatttccgttagtcgtagtttgccaatacgaaattcatgtagatgactatcctgccatcccatcacgatctgtatcacatcgtgcaatctgtcgaatgagatagaagcaggaacaacaaatcgtcgccaaatagcgggttttgagtctgtaagtgttatttttaattgatagaatttttcattcatcactaatctcctaatggtttcgagatgattctttccatgtgtgctatctattgtcaatattttgttgaatttttctggttggtattgtcggaataccagatatgtttagctgctatacgaaaatctttggtcatctcatcaattctagtggctaatatccataatagcttttacaacagataatctggcctaaccagcttgctctctactgaattctgtttggaggcaatctctttgtgcatgaactgtatctactaagtatagtttaagatcgtgagggggatcgatatattcagagcctttgttattaacataaaaaacgcatattatttacataccgttaatcaaatattgaagattaatcactgtcctaattcaggcaatccttaaccaaaattggtgaggagtttgtttatgcattggttcaattgattcaagccatctgaatgatattgcttgaagttatatcatgatgatatacagatgtttttattgtaaaaccattcagattaataagaaagtattatgaattgttagtattttatcgcatggattaaggaaataagtgcggtaaaaaaatccaagaaaattttacttttatatgcttgtttggttttattatgcaggccgatttaagtcttggatatcagctaaagtttatttatatatttagcgatttttcaattatgatattattgttcaattttaataaatatatattatacccgtcatctttcaagttgcctctttgttggctgcactcactcaccccggtcacatcgttatctatgctcccggggattcgttcccttgccgtcgcgatgcatcttgaaatccatagggtatattctttgaggaaattcctcttgcaatcgctcatactttagcaaaaaccgatgatatgtactgttttgtcttgtgttatcggtgccttgttattttcattttcatttttattttcaatgggattgttcatcttgttgtgctgcttatgatgggttattgctccaaaaatatccattaaaaatatatttttatttgtaaatgcaagctatttatttctattgaatttaatttaaaagtaattataagaaataataggtagtatcttatgatgtgaataattattttttcgtataaaaaacctcatcagtatatggataaggatttttataatcggacgattggatgatttttttgtttccgagagaaatagtttctcatactacatgtcttacatagaaaatagatattgaaattaatcgagtccttttgcaggagcctcccatattttgaaaaatcgttttacattgcttgcggtgtaaataacagtatgggatatatttcgatggccaagataatcttgaataaggcgtgtatctcttcctaaatcagcgagagcataaccgcaggcatgtcttagcatatgtggatgaggtgaaatattgactaatgcttgtttgccataacgctttaataaaccataaacttgctggcgtgaaatagcccctgatttttgtgataaaaagacccactctgaatctgattctcgccaactctttctaatattaagccattgatttaaagctttaatttcttctggtattagtgggtgtgttgttgataatcccccttttaatcgtctgacatgaataagttctgagttaagatcaagatcggataacgtgagattgcataactcgctcactctaaatccatggatgaaacacattagtagcatgcaataatctcgctcagcatgacatccttgacgcgctttttctaaaatcgcattaatttcatatcgggttaaaaacttacgtttcttcatgaaaataattcctgtgcaattggggcggatagttataggtagaaaaataatattaatctaccggaatatatcaattaatagaacttttataaaattattggctgataacgctatttattttggcaaaaatttataaataccgtttttagatagttataaatagcccttttttaatagaaaatatcagcttgtaagctttgtaattatatatttgaaaattatttaacaataaaaagaaactaaacagaatgcaccaaactgtaaatatgttcctataaaacgaccgactaagtcaaattttgtgtaatgccaaattactaatatttaactatttataatatatggatttttttcattattttttactatttttcatattttgccatcaaattattgtaaaaaattagtgggttcatctgaattcaatcaaatactaattgattaattagattataaattcaaattaatgtcttttttagaatgttaactccgaaatattatgcactcttagtgtttttgactgaaaaaaacagtttggtgcattttgtttggtttagaaaatattaatccgagatttttaaactattttgcgctgaatatcaggtgtatggagctggaatcctgcacggttatttttttatggttatgggtattttatccttaaattcaaggaattagttcacatgagattgaataaattggttatggccctggggttaggtgtggctttggctgcgggttcggtaaatgcagcgaatcctagccaaggtcacggaacggtgacttttaccgggtctattactgatgcaccttgttctatcaccccagaaacggttgatcaggtagttccactgggctctatttctagcgcatctttgcaaaacggtggccgctcttcttccacgcccttcaaaatttctttagataactgtacgactgaaacgataagtacagtcaccacgacgtttgttggggctaaatctagcatcgtcggcggtgatggtttgctaggtatcgaaggcgttgctaaaggtgcgggtattgcgatcactgatgcgggcggtaacaaaatcaaactaggtaccccttcaccagctgtcgctctgcatgatggtgataatgatctgcattttgctgcctatcttcaaggtgatacttcacctgatgccgttgttccgggtaatttcaccggcattgccaacttccagctgacttaccaataagtcttttcatgcacggaaacgctgacaaggaggcgggcgtttcctaatcaaaagttttggataagtttagctggagagaagtcatgagccgatatgctgccgttgttgtagtgccctgcctgttaatgttttcctgtgttattgaagctgaaacggctgttccacaaggaacgcaaggatatggtcgcgttagcatgcaaggcaccatcattgatacggcctgtgcgattgacgcaggtagtcgtgaccagacgattgagttagccacgatcccggtaagccggatgatacatgatggacagggacccgtgcgtcctttttctatccgtttgattaactgtgtactgacttctgccactttgggtaaacccgattggcgtcactttcaggtgatgtttgatggcataccggatgggaacaatttccggttatcgggtgtagctcaaggagtggcattacaaattacagacatgtacggcaatcaggcatatccgggaactcctctaccggtggaggggttacaggcagggcagatgacccttaattacgcaatgcgattagtgagtaatcaccagttattgcaagcggggcagtatcgaaccacggttcggttcaggctggattatcactaatcatcgatctgggaatgttatggctttgtttttgggtttgaccactgaatatgacagggtggtctcggttcggtgtgtcctgaaacctcttattgttttggtattgcttgctttaatgggtactcatgcggtgtatgcggaagaggaaattgaatttaatacggatgtgttggatgttcaggatcgggctcggattgatttaaaagaattttcccgcgccggttatatcatgccgggggattatcagatggcggtacgtctgaataacagcgagctgccggagatgccggtgacttttatggtaccaccggatgatccgaaggggagtgtggcgtgtttgccgcctgagctggtgaagcagttggggctgcgggcggaatgggaatcaaagatgacctggtggaacaataatcagtgtctggagattaaaacgctgcctggcatgacagtgcgcggtgatctgagcagtgacacgctatacctgagtatgcctcaggcttatctcgaatatcactcaccagactgggacccgccgtcacgttgggatgaggggattttcggaatgatgtttgattataacgtcaatgctcagatcgctaagccggcgaagggaagtgaaaatcagaatgtcagtgctaatggtacgaccgggataaatttgggggcgtggcggctacgggcagactggcaatcacagtataaccacgtcacggggcgggcagggagcacagagaaaaactgggattggagccgttattacttgtaccgggcaataccacattggcaggctaagctaacgttgggtgaggattaccttaattcagatatctttgacagcttccgttttaccggtttgagtctggtgacggatgacaatatgttgccgccgaacctgcgaggctatgcgccagaggtgacgggggtagcgaaaaccaatgccagagtgactattcgtcagcagggacgggtgttgtatgagacccaagttgcgccaggtccattccgtattcaggacatcaatgatgcagtgagcggcaaactggatgtgcgggtagaggagcaggatggcggtttacaggagtttcagatcgatactgcgaatattccctatttaacccgtccgggccgggtgcagtacaaactggcggcgggtaagccgactaactggaaacatcacagtgagggatcgggctttggtcttggtgagttttcttggggaataaacaatggttggtcgctgtacggtgggatattgggggccgggaattataacgcgttgtcattggggattgggcgtgatctgatggtctttggcgcactttcctttgatgtcactgaatcccgcgcccatttaccggatgaggaccaaacattgactggtggctcttatcgtctcagttattccaagcgttttgaggagtatgacagccaggtgacttttgccggttaccgtttctcggaacgtgactttatgagtatgagccagtatctggatcgccgttatcacgatggtgatgcagagagtaataaagaactttacaccattatgttgaataagcagttcacacatattggtaccagtatttacttgaattacagccaccagacttattggaaccgttcgaataacgatcgctataacttatcgatatcacgttattttgatattggcagttataagaacattaacctgaatctgtctgcttaccgtaataaatatgaaggtaaaaatgacgacgggatgtatatgacattatccctgccgtggggtaattcaggaacgatcagttataacgcaatggccaaccgggaaggtaattcccacacggtaggttattacgaccggattaatgaaaacagtaactatcgtttagcggttggttccagtattgacggcaaggccgcggctaacggttatttaacccattacggcgatcgcgctcaactgacgaccagtgcgagttatcaggatggacgttataccacgggagcgctttctattcagggggggatgaccgtgacgccgaaaggcgcggcactgcatcgtattaatatgcccgggaccacccgtttgatggtggataccgatggtataggtggcgtaccggtgaaaggcttcggcgcgattacccataccaatatgttcggtaaggcggtgatctctgatgtaaacaactattaccgtaacagtgcgagtattgatttgaacaaactgccggacaatgtggaggcaatccggtcggtacaacaagcaacactgacggaaggggcgattggttatcgtaaattccaagtgatatccggtgaaaaagcgatgggtatgatccgcttgtcggatggtagctcgccgccgtttggggcaacggtgctgaataaggatcaacgggagatcggtatcgtcagtgatggtgggaatgtctatctcagcgggatcaatccggcagagaaactggatgtgcgttgggatggggagttgcagtgtgtgattgagctgccacaagaattaccaaaagtcgaagagatggcttcgttattactgctctgtcagttagccgacgacaataaacagccataactttgattgactggcagcgtgaaaacctgattgctgtcaccgaaattgctgtcaccgaaattgctgtcaccgaagtgtatcgcggtgacctgtaatgattattctaagaatgagtaattaagcatgaaattgaagaatacaattaatgtagtcacgatcgctatcttaagtctgtcggtgatcagtgagtcaatggcggccattgcgctggatcgtacccgcgtcgtgtttaacggtggggacaaatccaccagtatggatatcagcaaccagaacaaagagttgccgtatctggcgcagggatggatagaagatgagcagggtaacaaaatcaatggtccgttagtggtgacaccaccggtgcagcgggtggaaccgggcgctaagagccaggtgaaaattcagtcactgccaacaatcgcacagttaccccaagatcgggaaagcttgttctattttaatttgcgtgaaattccaccacgcagcaagaaaccgaataccttgcagattgcgctacaaacccggatcaagctgttctatcgtccgaaagccatttttgccagccgtaccgatttggataatccgtggcaagagaagatgactttgacgcgtcagggggaccgatatcaggtgaacaacccgacaccctattacatcaccgtggtggatgcagcaagccagcttaagggtaaaacggtggtggactttaagccattgatgatcgcgcccaaaagtaatgtggtgctgagtgggagtgccggggcattaggcagtgcgccggtgctgacatatgtcaatgattatggtggccggccgcaattgatttttagttgttcaggcaaccattgtcaggtggctcaacgttcgtcgtgacgggcgaagccgggaggaacgacgatgaacatcaagcggataggctacggattgacactggcgatctggctgataccagtgatagagagtcaggcggcggaaaagcgagcagccgatatcgaaggcttgcatggcgaactgcatgtgtttggtgagctgactgaggcggcttgtcgactggacatgacctctgcatggcaggaggtgaatttgggggtaacaccaaacagtgatttacgtcggtcaggtgataaagggacaccgataccgttcacattgaagtttcgtgactgtctgcgaaccaaaggagccgtacatgatatgcggaccggcaatctgacgtggagccatttacagccggtggtgacggtcagttttgtggcaccggcggatcgcgattatccacatctggtgcgggtgagcggtatcagcggattggggttacagataacagataccgctaacaatgatatccggttgggagagcggggacgcccacgttttgtggctgcgggacaggacagcttggaatattacgtgacgccagtacggacgccgagagcgctagggattgggcaatatcgcgcggtggtggatttcagggtgaattatgactaattctcggtgttctctgcgaataaagaaacggtatcgcaggcaaaaaaaatggcgcgtattactgcttggctgtttattgagtgtgagtgctcaggctgatttactgacaacaaggggaaatatagccgcaagacctgccggtaatttttcgggtaaaaccccgatcaacatttacggcgtggttatcgcacctccaccttgtgtgattaataatggtaatactatcgatgtagattttggcgatgtgatgattacccggattgacggggttcattatatgcaaccggtcaaatacagcatgaaatgtgaaaaaatgccggctaatgccatgaaaatgatgatatcgggcaacaccgccagttttgatccggcggtgttgcaaaccaatcacactgggcttggtatcgctgttattcataacggacgaaaattgcccgtcaatgactggatgaaatttaactatcctgattttcctgaattatatgcggtgccggtaaaagatatggctacggtattgaaaggcggcgactttggcgcgggtgcgaccatgatggtggaataccagtgaacgggagacatgcaatgaaccatttgatctatcgtgttttctggacggtttgcttaggtttcatcaatgtgatgccgggacaggcagccgataatatgtggtttcacggcacactgcttgaagcgcctccttgcgttattgatgacggcaatatgattgatgtctattttggtcacaatgttggcatccatcaggtggatggagtgaattatacccagcccgtgaattatcagttggtctgtgcgcctaatatctcaggttggagtttaggattgacagtgattggcccgtcaacctcatttgatgccgccgcgttgcaaaccaatattaccgatttaggcattcgtctgacgttggatggtaaagcattcacccttaatgagcgtattccggtgacatcacagaaacagccggtaatacaagcggtgccggtgaaaaaaccaggaagcacgttgccggaaggggcgtttgaagtgatggcgacattgctggcggaataccagtgaaaggaaactcaatgaaatatttaaaattattcgtgttgcgggtgggttttatggttattgctgccacggtttatggccatcaaggggtacaggctgcggataatatgcgttttcacggtgcattggttaaagaaccttgcacgattaaaccgggtgatgaagatatccagctcgattttgcaacaatttctgaaaaatatttgtatctgcatggtagaacccatagcgaaccttttctgctcagattatctggttgcgacatgagtgtgggcaaatcgttcaaactgacatttagcggcatagaaaatacgcaattgccgggtttattagcattaagtgcgggaagccaagccgctgggattgccattggtatagaaacggcagaaggcagacggttgccgttgaataaagagggagatgcctatccgttaaaagagggtgaaaacttgattgcactacaagcctatgtgcaggcagaacccatagcgctagctaaccagacgattacgcgaggcgcatttcatgcgattgcgacatttaatctgaattatgactaatttgcccagctttattaggtagcttaaatgaaaaaattattctctgtttgcctggtatttttatcactgttttcatcaagtgcggctgcatcaatattttcatatatcactaaatccgaaggtgttcctacgaatgcctattatacttttgtcattgagcgttgggaccaagaaaacgattttacgccaaatccttgttatggttattctgcatgttggatatcggttaaccatcgccattttgctgatggttattcagggcagccctataggatatttaatactcgcgtggaaagatttaagacaatgaaacaagtgcaggcggagatattgaaatataccagttttccgatcaccggagtggcaaaacattttggccctgcgattcggtctcatcaggaatgtgtcgggctattttacgaaaccgatcaaaatggctttcatggaagattattgcctggctctttatgtggtgttgcaccaccgccgataggcttttgtcaagtcagtgaaggttccgttgagcttaattacggcagcattgatgaggcaaaactagacggtgcaacccaaacgggaaatatcaatgtgacctgcaatgtagacataaagattatcgtgatagcaacgggccttaatggagaatttgtaccgttgagaaacgatggtagcttgaaagctaagttgttattaaatgatagcaaaggtgaagatggtgtggctgtgtttgtaccggctggaggaaatgtacccgttacagtgaaatcaattttacaaaaaaatggcagagtagaggcaggacctttctcaggatcagggacaataattttggcgatgccataaaaaaggtgtttttttaatttaaaggctgggatgaaaatgaaacaagatcatctattagtagggaagcgtattcaaaaaagaaggaaagagttgggcatgaccgcggtaaaattggcggaaaaaataggcattagtcagcaacaactctcacgttatgagagagggataaaccgaattaatttatcccatttggtgcagatcgcttcaatattggagacaccgataaactggtttttccttgattgtagttatccggcaagcaataacagcatcaataaattaacagaccaatatatccctattgcggaagcgacattgggtaaatttggatgttaactgaactcgacgccaatcgggggatcgataaacccgttgatgactgagtttcgtgaccgacggaacggtcacttttatgatttttctgtcagccatgttattaccacaaattaaaaaacccactcttgttcatatccccttttgacgaagttattagaattcagatagtcgtttgaatccgccatcgccatgttgaatagctgccatcattatggaattgagttgaagatgacggctcaaaacgaatcctcgattaatcccttcaatgctgaaaatcaataagagtaattaatgtaatgcttttgtgatgctggagattcgtgtttctgcgtaagggtaagaaagtgtaaacgtgggggaaaatgttactcgaagtagtggtgtggctttcaatgacatcagtttctgatatgggacaaaaaaccgaacatttagagttattttgttcggttattgtcaaccgccggggcagtatacggaaaatttcatcacttaaaagcgattttttgtattattttgtaaaaacttacttaattttttgattacaaaaggaaattatttcttttgttatggatattatggcctgtttgaaggtcgttttttgagcaatttgatattcattttcttatgcaacaggctgaaatcctgaaaccaaatggcataaggcagaagtgatttcgtaatgtgaatattaatattcatatatttcatatagttaataaccaaacaaaataactctaaatgaccagtaaatgcaccgcgctagcggcccggttgtttaatctgtcatggtgttgttttaggcaaaatgtattaacgacgagatgtagataaggaattaatgaaatgaaaaagcaaatgatgaaaaccagcgtattagccgcagtgctcttaagcatggggatggggatggcacatgctgctgcgggcgatgtgcttgctagtaattcagtggttgtgaatggtgttgtaggagcggcaagttgtgtactcaacgtcacagacggaggagcctcaactacctcgatcgacttaggcgcgattaatcagagcgctattaaatccggtcaattaatcggcacgaagaaaatcaaggttgaacttggtgattgctctcaagtcgttgattcaaatgacaataccaaacttaacaccggagttggtttgagaatttctggaacagcttccactgtttcagcggattactttgccgcgcctggcgacactaataataagttagctgtagctgtgcagaatggtagtaaattcttaaaacccaatgatgcggttagctttacaaaaggtgctctactaactgatgtgatgcaagaattggacgtaggtatgattgctaaaacccctagtgatgtgacggcgggaatgagtgtcagtgtaccactgactttccaacttattgagaaataatcaaatttatcattaatcaacgccatcaggcatcaggaacacatagctgtggaattggacagggaagtccaattcttactttacgtaacaccaaaacagacattttcaggtgattcagtgaaaagattgatgacagcgatgatagtggccggtctgttaggctgtccggtcacttccgtacaggcggaaggagtggggatcaatgccacccgcattatctacccggctgatagccacgcaacaaccgcttcagtacgcaacagcagtaaagaggccgtctatctgatgcaggtgacggtcagctctaccccagaggggggcaaaaccgcgccatttctggtaacgccgcccctgtttcgtatggagcccggcagccagaatcaggtccgtatcatcaaaaccggccaggcactgcctgccgaccgggaatccctgttctggtttaccgcgaaagccatcccgttaagccccgaatccggtaatccctcgggtaagcagatcaccgggggcatacagattgctatggctaacacaattaaactgatgtatcgcccgtcagggctgccagttgcaccggagaaaggatttggttcactgcgcttcaaaccgacagccgaggggataacggtcacgaatccgtcaccctattacatcaccttcgcctccttaaaagtgggcggccaagagctgatgacgcagaaacagaaagagagcatggtttccccgttctctgccctgtttttccccctcaaaggcgtgaattacccggccaaagtgagctggacagtaattaatgacctcggtggaggatcatcctatcaaggggagataccgtaatgttaaaaccgtggacccttatcggacggacagcactggccggtctgctctgtaccatccccctgcccgggggagccagttcaaacacggcagaactgacgctggcactgacgctggaacagccaacctgtgaacttaatgtacagacctcccatgtcgagttttcatccataccgcttaatgaagtgcaacgcagtgcggaacatatcgcagcggcggacaacaagcctgtgacgctggcgttgtcaggttgtgcgggatcagccagaacaggccgtaccccggcgattaaaatagccggccccacaccggaaaaccacccgacgttatttcgggataaggcttccactgcggcgggaaacgtgggatttggcctgcgctatcaatcaccggaaggcgggctggggagctacctgaaaaatggcgattatgtggatttggcatcaccgggtaacgccgttaaagacggtcaaattaccttccagatggatatgcggcatgaatccggcacggcggtccccacccccggtgagctgaccgcgcacattcaatttcaatttgactatcactgagtgtcgctcaggtaacaggtttcaggaggcgttgtggaaacaggtcggatgcgcacaacgtggtacaggctggcaccactactattctgtctagggttaggcatggccggcacagaaccctgtcaggcagccggtatcagcctgaataaaacccgggtgatttttacccaaggggcgcgggcacagacgctgacggtggttaacaccacacctcaggcgtggctggtgcaggtgaggatcacaggcgatcaggagaaaaccgcaccggcgtttgtggtgacgccgccgctgttcaggttggaggccaatagtcagaacagcctgcgtattttgccgacttttaatctgcccccttttccagtggatcgggaatcgctcgggtatgtccagatgaatgctatccccgccgcccatccgatggcgaatgagcacgctcgggatcaggcgtcgatgagcgtgggaatgcgaattaagtttttctggcgaccgcatggcctgccgatgttgccggaacaggcgtatggacagctccgctttcagtcgcaacccggtggcattaaggcgtgcaatcctacgccgtatttcctgtcgctggacagcctcacgctggacggacaggcgctcgatctgaatcgctatccctccatgatagcgccgcaggattgtgtgacctatgtcggacaggcaggcaaaaaagcggtgagctggtcgatgattaatgattacggcggggcttcaaacctgtttaccgccaacgtggcgggttaaattcgcccttgttttatccagaggtggaaagtgaagagagtcagtaacgggaacaagcgagcacccggtggatcaatgatttaccctttctgtttcgccctgctgctaagcggcctgttaaaggcgcaggcggcggagaatccggggttatcgttctccccgatgcagttatcgtatgtcgccaaagacagccccggcggggtgaccctcagcatgaccaaccatacggcgcagggctatctggtacagggatttgtcagcccgatggaccccgataccggtcgctttgacacccaaaccgggcgggttcccccttttgttgtcctgccgccgttaaagcggattgaggccggcgggaaattttcgttccgtattcgccagcttggcgggcagttaccgccggatcgggaatcggcctttgtggtctcgttgcgggctatccccggcgtcgccgtaccggacacgcacgtgcctgagcgccagaccggcaagaactcgcaggtgcaggtcgctttacagatgaatatccggctgttttatcgccctaaaggcgtccccgcccgggataacgccgcggtggcaaaacaggtgaaattttcccttcaggggacgcagttgcgagtggaaaatcccacaccctattttctggccttttcggtcctgaaaatgggcacacagcatgtggatgaccacacccgccagacgatggtgcccccgaaaggcatacaaacctattcgtttaccgccgggggacaagggccactaatctggcgttttcccggcgacaatcaggatcgccacgtcccgttataaacccgccgcatcggcggacggtataccggcaaagcgacctcaatatcaacagcacaggcttaaattagaagcagagatgagctatggcaataaacactttatttccgtctgcactgcggacgggtaaccagcgtgcgcccggtcaaccgggcagtttccggccgcggccggtatacctatgcctgctgtgttcactgacggcaacggccctgcccgcctcagcgcgggaatactttaatccggcgttcctgatgggcgctgacggtgaacgcagtcatgtcgatctctcggcgtatgaaaacgcgggctatgtcgcccccgggcgctatctggtggatgtctacatgaaccagaatcgggtggacagccgcgagattgaattcaggcaggttaacggccatctccagccggtattaaccgtcgcacaactggaagggtatggggtcaatacccgcggattaccggcttttcagggtaaagcggacgacagcctcatcaccgatctgacgaaacagatcccgcacgccagcgccacactggatttcgcccgtttgcgtctggatctcagtgtcccgcaggtcgctatgcagccccactattccgggatggttgatccgtcactgtgggataacgggatcccggcctttttgatgaactacacggtcaacgggtcggaaggccgttatgaccgtcagggaaactggggaggatcacgttcccgtaacctgtttgcttcttttcgtgacgggttaaatctggggccgtggcgtctgcgcagcacgcaaacttacagttacaatcgtcagcgcaacgaggccgccgccggcttttccacgccggcacagacccaatggcaggtgagcaatacctacctgcaacgtgatgtcccctcactgcgcagcgagttcacggcgggtgaaacctataccggcggcgacatttttgacagcatcccgtttcggggtatgaaactggcttctgaggaggcgatgttacccgacagtcagcgcggttttgccccggtgataaccggtgtggcgaacgccaatgcgcaggtgacggtatcccagaatggcaacatcatatatcaaaccacggtggcaccggggccgtttcgtttcaccgacctctatagcaccgggagtgccggcgacctgacggtgaccgtcaaagaggaaaatggccgtacccgcgtctcgacaatcgcctcgtcgtccctgccggtgatgcaacgtcccggcggcgttaaatatgaattgacgaccggtcaatatcacggcggcaacctgaccgatggcagccgttccccggtatttgcgatgggcacgctggtctatggtttgccccacaatatcaccctgtatggcggcggactggtcgcaggcaactaccagtcgggtgtattaggctcgggggtgtcattgggggcatttggcgcgctgtctgcggatgtgacgctggcccatgcacagttgcagaggagcaaagatcaggaagaaagcggacaattcggccagtcttatcgcgtgaaatattctaaaaacttgctgagtaccggcaccggcattgatctggccgcttaccgctattccacccagcattactacagtttcagtgatgctaacagcatgggctacagcctgaatgaatatcaggtgccgtgggcacttgaccggcgtcagaacacctggcaggtgaacctgcgtcagacactgggacgctggggcagtctttacgcctccgggacgcacaacaattattggaatggccgtaccgacaacaacctgagtctgggttacaacgcgatgctgatggggatcagctataacctgagttataacatttctcgtatcaggggcgagggccactggccggaaaaccgtcaggtatcattcaatatgcaggtcccactgagtctctttggatcatcgtcggcgttacggggcgtttacacccgctataccgcctcacgcgactcgcagggtaacctctctcaacagaccggcatcagtggcatgttatgggataaccgcctgagttatcacctccagcaaggctggggacacagcggccagcaaaacagccgggccctgtcgctgggttatcagggcagtcaggggagcgttaatctgggttacaatgacagcgcagacagccggcatgttacctatggcacgtccggtgcccttctgatccatccttacgggctaacgctgtcacgctcgctgggcgataccgccgtgttagtccgcgcacccggggcgaaaggggtgacggtcagcaacggcaacgtacagaccgactggcgtggctacgccgtactgccgggcggatcggtctaccacaaaaacaccatcaatctggacccgtccaccctgccggaaggggtcgatattgaccagaccagccgcaacgtttacccgaccaaaggggcggtgacgctggccaattatcaggtccggctgggcagccagttgctgctgaccctgacacatcatggcaaacccgtgccctttggtgccaccgcaacgctggcaggcaacgcagcccaggccggcagcggcattgtgggcgataacggccgggtttatctgagcggcatgccgtccgccggtcatgtgaaagttaaatggggaaacgaggccaatcaacaatgcaccacccgttatcaggtgtcgtccgatacccccgggaaactggtgcaggctgatgccatatgtctataagcgtgaccctcatgtgggcagcctgaaccggcgtgcccgatgagatatcgcctgtctcgctttgacgtccggggcacccccaaagcgaggttagccccaaccgtgaaagagcgaggtgaacagatgagtaatttggagagagaaggatgttaaacactgaacgtttgtggggcggtgaggcagaaaaccccgtcccaaccatcatggggctgggggtatcactgctctttttattgaccgcattacccctccaggcggctgagacttatcaggactgcgggactgaactggggaataaagttagcaatgtctccggctatgccatgatgccgaacaataaagataagcgtgattattcacgggatgaaatcgtgggttataccaccagcggcccttttgaccggtcgacaacctgccgcgttccccccgggacccagtttatggcctacaccgtgggatcggggaccgactcattgatctcttcgtcgtcaccgggtagcgtccgggtcggcaaggctggcgactttatggttgatatcgggcaatcgtcactctcttgccagacgcatggttcacccgatacgtatcaatcagccagtctggtcaaaggaaatgctggcgttaaccttccctgcgtcccggatgccaacggtctggttgatatcagtgttcgctcagtgaccggagccatttacccggaccgcgacgggaatttcaatgcaaaacccggtggaagttatttatctgtgggctctatcggctgggcttcaacggccgtatcgggttccagcagcataccgacccccctgtggaccacggttatcctttcaccggtcaaaaagccgtccacctgtgcagtagtgcttactccgtcatcggtggattggggaacggtgaaaagagccggtaaacaggcgggagagacactggcgtcggccagacagatcgggataaacagcacctgttccggtgatgacgcggtatttcaaaattcacgcctgctctaccggatcgatggccccttcgtgccgggcaaaccgcatgcgctggcctcgtcaatagatcaggtcgccttcgcgttcttcgattttgccaataaacccttatcactcagtaccgggcaccgaggtacaggggcggaagcgagatatgttaagctcggggacgacagttataccgcttcaacccaactgtctgtggtcccggttctgttgaaaactgacggtgccggagggctagccagagccgtcgcggtcatttccgtgtggtcggatgttaacttcgtcgacccatctgcttagttattgctatcgttgcagcgccgatcggcgctgcataaaccagctttttcgctcccttgccgccgcgatgcatcttgaaatccataggttatatatcgaaagctaataattgattgtttcaaaaaaggaacaaactgcctctcaatatttcccgctcagaaatcgatatgttatcgacggttgaaccaaacttcagaagttaatcagcaaacaaaataactcaaatgacaagtaaaacgcaccgcgttagcgatctggttgtttaacttgtcgtgatgttgtttcacgcaaaaagtatcgaatagataaaaggaatcgatgaaatgaaaaaacaaattttgaagacctgtgcgatagcggcactgtgtctgggggggatgtcgcaggctatagcggaggatgtgagtgccggtaccttggcagtaagctcttccgtgaccgcagagacgtgtaagtttgcagcaatagagcctgttagtctctccgctttggtatctgatttcactgcggtaggaaatggagcaatcgtagctaacacgcaaaaattcgtcacgattaaaacggaaaaatgcccgctgtggagttccgcgaaaagcgttaaattgacggttgccggtaccacattagcatcatccagtagttactttcagcttcttaacaccacgggtaatgctgcaatcaccgaccatgcggttgctattacgataaatgataaggctttaccgccaaatgcaggaattaacctaaaagatccccaatatagccccgcagtagccggtgataatgccatcacgcttaaggtagggctggctaggattggtgcgacggcggtaaaagcagcagactccaaagcaaacctgaccgtgaaagtctcgtatgactaattcaacgctgtcagacgttagaaacacatagttgtggaattggacagggaggtccaattcttacttacgcaataccaaaccagacatttcaggtgatgtcagtgaaaagattgatgacagcaatgatagtgaccggtctgttaggctggccggttacttccgcgcaggcggaaggggtggggatcaacactacccgcattatctatccagcggatagccgcgcgacaaccgcctcagtgagcaataccagtaaagaggcggtctatttgatacaggcgacagtcagttctacttctacgggagataaaaccgccccatttctggtgacgccgcctctgtttcgtatggaaccagacagccagaatcaggtgcgcatcatcaaaacgggtccgtcgctgcctgctgaccgggaatcgctgttctggtttacggcgaaggccattccgttaagctctgaatccgataatcgctcccagaggaatgtctccggcggaatacagtttgctatagccaacacgattaagctgatgtatcgcccgtcaggattgtcggtttcgccggagcagggatttggttcactgcgcttcaaaccgacagccgcgggaatcatggtcaccaatccatcaccttattacatcactttaacctccctaaaagtgggtggacaggaggtgatgacgcagcagaaagtgaacatggtctccccgttctctgacctccctctactactacttaaaggaggacgttatccagccaaagtaagctggacggtgattaatgacttcggcggagaatccacctatcagggggagataccgtaatgcgcaaaccgtgggttcttatcagacagacaacactagccggtctgctctgtaccgtttccctgcccgggggagcgagcccaaacacggcagaactgacgttggcattgacgctggagcagccaacctgtgagctctacatgcagacatcccatgtggtgttttcatccgtaccactcaccgaggtgcggtatagcacgcaacatattgcggcggcgggcagcaaacccattacgttggcattgtcaggctgtgcgggatcagccagagcaggccgtaccccggcgattaaaatagccggtaccacgctagaagagcacccgacgttatttcgggataaagcgtctacggtggcgggaaatgtgggatttggccttcgctatcaattgccgggaggcgggttggggatctacctgaaaaatggcgattatgtgaatttggcaccatcgggtaacgccgttaaagaccgtcaaattaccttcctgatggatatgcggcatgaatccggcacggctgtgccgactcccggtgaactgactgcgcacattcaatttcaatttgactatcactgagtgtgattcaggtaacaggtttcaggaggcgttgtggaaacaggtcgggtacgccctgcgtggtaccggttggtgctattggtgttctggctagggttagggatgagcggtatggaatcctgtcgagccgccggtatcagcctaaataaaacccgggtgatttttacccaaggggaacgggcacaaacgctgacggtggtcaataccacacctcaggcgtggctggtgcaggtaaggataatggaagatcaggagaaaatcgcaccggcgtttgtggtgacaccgccgctgttcaggttggaagccaacagtcagaacagcctgcgtattttgccaacctttaatcagcccctctttccggtggatcgggaatcgctcgggtatgtccagatgaacgctattcctgcgactcaacagatgacggatgagtctgttcgggaacaggcatcgatgagcgtggggatgcgaattaagtttttctggcgaccgcatagcttgcctctgttgccggaagcggcgtatggacagttgcgctttcagtcgcaacccgatggcatcaaggcgtgcaatcccaccccgtattttctgtcgctggacagtctcacgctggatggacaggcgctcgatctgaaccgctatccctccatgatagcgccgcaggattgtgtgacctatgttgggcaagtgagtcaaagctcggtgagctggtcgatgattaacgattacggcggggcttcaaacctatttaccgccaaagtggttaccgccaacgtggcgcgttaaattcgcccttgttttatccagaggtggaaagtgaagagagtcagtaacgggaatgggcgagcacccggtggatcaatgatttaccctttctgtttcgccctgctgttaggtggcctgttaaaggtgcaggcggcggagaatccggggttatcgttctccccgatgcagttatcttatgtggctaacgatagcccgcgcggcgtgaccctcagcatgattaatcacacggcacagaactatctggtacagggatttgttagcccgatggaccccgataccggtcgctttgacacccaaaccgggcaagttcccccttttatcgttctgccgccgttaaaacgggttgaggctggcgagcaattttcgttccgtattcgccagcttggcgggcaattaccgtcggatcgggaatcggcctttgtggtctcgctgcgggctatccccggcgtcgctgtaccggacatgggagcaccagagcgccagaccggcaaagattcgcaagtgcaggtcgccttacaaatgaatatccgactgttttatcgccctcaaggggtacctgctcgggataacgccacggtggctaaacaggtgaaattttcccttcaagggacgcagttacgggtggaaaaccccacaccctattttctgaccttttcggtcctgaaagtcggcggacaacaggcagatgaccgtacccgtcaggcaatggtgcccccgaaaggcatacaaaactattcgtttcaaacccattcgtttcaaacccatttgtttcaaacacattcgtttcaaacacattcgtttcagacccattcgtttaccgctggaagatcggggtcgctggtttggcgttttcccggcgatagtcaggatcgccatgttccgttatgacctgtcctcatctgcgggcgatgaccggcaaagtgacctcaagattaaccacataggcttaagttagaagcagagatgagctatgacaataaacattttattttcgtctgtgcggccgacgggtagccaatgttcgcccggtcagccgggcagtttccggctccgtcctgtatatgtctgtctgttatgctcactgacggcgacaaccttgcccacctccgcgcgggaatactttaatccggcgttcctgatgggggcgacgggggagcaggagcatatcgatctttcggcgtatgaaaacgcgggctatgttgcaccgggacgctatctggtggatatctacatgaaccaagataaggtggataatcgcgagattgaatttagattggtggatgatcatctgcaaccggtattaacggttgcacagctcgaagagtatggggttaatattcgtgggttaccggctttccagggaaaagcgagtgacagccccatcacggatctgacgaaacagatcccacatgccagcacgatattggatttcgcccgtttacgtctggacctcagtgttcctcaagcagctatgcagccccaccattccgggatggttgacccatcactgtgggataacgggatcccggcctttttgatgaactacaccgtcaatggttcggaaggtcgttatgacggtcaggaagctggcggtggatcacgctcccgtaacctgtttgcctcttttcgtaatgggttgaatctggggccgtggcgtctgcgtagcacgcaaacttacagttacaatcgccagcgcaacggaggtcccgctggtttttccccctctacgcagatccaatggcaggtgagtaatacctatctgcaacgtgatgtgcaatcactgcgcagtgagtttacggccggtgaaatctataccggtggggatatttttgacagcatcccgttgcgtggcatgaaattggtttctgaggaggctatgttgcctgaaagtcagcgcggttttgccccggagataaccggtgtggcgagctccaatgcgcaggtgacggtatcccagaatggttataccgtgtatcaaaccacggtagcgccgggaccatttcgttttaccgacctgtacaccaccggggattctggcgacttgacggtcacggtcaaagaggaagatggcagttcccgtgtctcgaccctcgcctcttcatctgtcccgatgatgcagcgtcccggtggcattaaatatgagttgacggccggtcaatatcacggcggcaacctcactgatggcagccgttccccggtatttgcgctgggcagcctgatctatggtttgccacacaatatcactctgtatggcggggggctggccgcgggcaattatcagtcaggtgtattcggctcgggcgtgtcactgggggcattaggcgcactgtctgcggatgtgacgtttgcccgtgcccagttgcaaggggttaagggacaggaaaatagctggcaacagggtcaagcttatcgggtgaaatatgccaagaatttgatcagtaccggcaccaacattgatctggccgcctatcgttattccactcagcattattacagtttcagcgatgttaacagcatggggtacagcctgaatgaatatcaagtgccgtgggcgcttgaccgacgtcaaaacacttggcagttgagtttgcatcaaacgctgggacgttggggcagtctttacgcctccgggacgcgcaacgattattggaatggccgtaccgacaacaatctgaatttgggttataacgcgatgctaatggggatcagctataacctgagttataacatttatcgcatggaaggggcaggcaactggtcggagaatcgtcaggtgtcattcaatatgcaggtcccacttagtctcttcggatcatcgtcggcgctacggggagtttacagccgctatacggcctcgcgcgactcgcaaggtaacctgactcagcagaccggcatcagtggcatgttatgggataaccgcctgaattataacctccagcaaggttgggggaatcgtggccagcaaaacagtcgggctttgtctctgagttatcagggcagtcagggcaacgttaatctgggctacaacgacagtaccaatagccatcatttcacttacggggcttccggtgccctcctaatccacccttacggcatgacgctatcacgttcactgggtgatgaagccgtattggttcgtgcacccggagcgaaaggggtgacggtcggtgacggcaatgtgcagaccgactggcgtggctacgccgtactgccgggcggatcggtctaccacaaaaacaccatcaatctggacccgtccaccctgtcggaagggatcgatattgaccagaccagcaagaatgtttatccgaccaggggagcagtgacgctggccaattatcaggttcgctcaggcagccagttactgttgacgttgatacatcatggcaaaccggtaccttttggtgccaccgcgacgctggaagagaatgccaatcaggccggcagcggcattgtgggcgataacggccgagtttatttgagcggcatgcctcccgccggtcgcgtgaaagtcaaatggggaaacggggcagcgcaacaatgcactactcgttatcaggtaccgcccgatacccccgggcaactggtgcaggcagacgccgtgtgtctataagcgttacttcatgtgggcaccactaaaagtgaggttatcccgccagttaaagtcagcgatttgaacagatgggtcatttggagagaagaagaatgttaaacactgaacgtttgtggggctgtcatgtagagaaccccgttccaaccctcataggtttggggatatcactgctctttttattgactgctttgccccttcaagcggcagagcgttatcaggactgcgagattgaactggtacagatggttcgtcatgttacgggttatgccacggtgccaaacaacaaagataaacgtgattactcacgtgatgagatagtgggttataccaccagtggcccccttgactggtcgacaacctgtcgcgtcccggctggaacgcagtttatggcctacacggtggaatctggaacgaacccattaatctcttcgtcgtcaccgagtcacgtccgagtgggacgatccggcgactttatggttgatatcgggcaatcttcactctcttgccagacgcacggtttatccggtacgtatcgctctgccagtctgacagggcggagtgccggcgttaacattccctgtgttcccgatgctaacggcttggttgatgtcagtgtccgtaccgtgacaggcgcaatttacccggacagtgacggcaatttcaatgcgaaggcaggaggcagccccctgtcagtgggcgcgatcggctggattcccgccgccatatcgggttctaacgggaggctgaaacccctgtggaccacagtcatcctttcatccgttaaaaagccgtccacctgtgcggttgtcctgacgccctcatcggtggattggggaacagtaaaaagagccggtaaacaggcgggagacccactggcaccggccagacagatcgggataagcagcacctgttctggtgatgacgcggtattccaaaattcacgcctgctctaccggatcgatggacccttcgtgccgggcaaaccgcatgcgctggcctcgtcaatagatcaggtcgccttcgcgttcttcgattttgccaataaacccttatcactcagtaccgggcaccgaggtgcagggcagtcggcgagatatgtaaagctgggggacgatagttataccgcctcaacgcaactgtctgtggtaccgattctgttgaagactgacggtgccggcgggcaagccaaggccgtcgcggttatttccgtgtggtcggatattaacttcgttgagccatctgcttaggctggggaatttatcgaaatggtttggtgacgatgttgttttctatttcacagaagcacctatttcacagaagcacctatttcaagcgcaggtgtttctgtgtttattagaacgtcaaaacgttaattagataccgtatctaacccctaaccccgcatttctgttatttctatttctttatcgaagcgtaaatgctcatcggccgccatagggatcagccaacgtaaattatagatcacattatcgggtaatgaatttgcttcatagatattaacgatctctttttcaatagaattgacagaatagacacgatcatcatacatatagagaaaatttacctgataaacatcaggacgagttaatacggtaaatagtcgccactcttcaggacgtgtttcaatgccagcttcttcagcaaactcccttgccattgcctgttgggggctttctcccgcttctatttttccaccaatcccattgagtttccctttttgccaactgggttgtaattttgaaattagcgagacatgttttttatctttagaaaacataaatcctgttacatagttaatcattattttctccacgcttttatttcactactaatgtctgattcctgtctggtccatatgaaatatatttaattgggacaccagtatagtcttgaataaaagataagaagtcaatcagctcaataggtagctccgttaaatctgtataggatgagttaagtgtgctccaggatttaaatgttttatagataggtttggctctatcgagctgcaataatgcattatcgcaacagacgagtttatcatcaatttcataggcaacagcgacttttatttcatctaaaccagcaagaacatcaacattcgttatcgcgagttctattacaccattaagtttcaccgcgtgtttaatcagggataagtccaaccagccacaacgccttggcctttttgaaacggtgccatattcgtttccacgctctcgaatataatcagcctgttctgtcgataattcggtggggaatggcccgttgccgacacggatcatataggatttcattacaccgacaatatgcattttctgtgccggtatacctatcatggcaaagcaggtttgcactagtgtctgatatgccacggtataaggataagtaccaaaactattatctaagaaagtggcttgtgatgtctcaagtaaaacatcttctcccgaattaagtaaatcaccgataatttcattagtgaacgtgaaatagggttctatcctcttgccatattgatgtgttgtttctaacatctcttcaaaatctaatgaagcttgtgcattaaaaacatggttaatctgcttttccctaatactccaaagaaattctaatttactccttaatttctctttatcaaaggtatcaataagccgaatgccatgacggttggctttgtcttcaacacaggctccgacaccgacacccactgagccgatcttctgtttacctttatatttttctgacgctcgatttaactcggcgtgtaatggtaagacaatatggcatcgcggatcgataaatatatgagaatcaatatcttctttttttataaagtcgatctctttaaccagaatgggaagactgattaaagcaccttggcagatatataagttctttttgttgagtgatgcgggtaattgagaaaatgagcctcttagattaccatgttgcacacaatgacctgcattagcgccgccattaaatcgagcaatgttattgatattgccagataaatagtcaacaaattttcccttaccttcatctccaaattggagtccaactacagccgttaacatgaatctgttccttaattatttattgatttactctaaataatagttaaataatccagtttggataatatttttaagatgaataatctgctcttttaaaactaatatgctaactatctattcatacatcgttataaattatcccttttcttatccgattattttgaataatcatttatgattatttctggattagcgagtcagctattaataacgcttcacttaatgtatcaacaatgggaacaccggcagtttcaagactgacacgactgtgggttcctccggtataaagaatggcatgagttcctgccgctaatgcggcaattgcgtcatcagtagcgtctccaataaccacactttgctcaggagcaacattgagttttttgagatggttagctaactgctctgatttgccggtggtcaataatggcgtatttctaccatctatttgggtaaagaatttgccaatgccatgattatcaagcatagggactaattcattatgctccatcagtgaacataatgattgggttgcacctgtttcatagcgggaagcgaggagctggctcacaccttccgttaaactggctttctgaatacccggccgatagtgaaaattaaatatttttccgatcactgaccattcagaagatgagggttcacggccaatcacttgtttatagaaagtttgtactggaacacaataatattcgcgatattgttccagcgttagtggatcaatacccatttctgccaatgcgaaattggttgcactcaatgaaacattgacatcattaagtaatgtgccattccaatcccaaataatatgtgctgttgtcataatcaattaactcctttttcaaacgagtttttgcgagctgaacattcaggacattgatgtgccagggccttaaatgcatcgattggttgttcataattcagcggtgtttgtgcttttagatttaataaaaaacgcaataatttggctgcccatgttgagtttgtcagggtgtcatgaaggacagacaataaactgtatgaataggcaacccaatccgccgtagttgtatgaacatatttatcatcagcgaaaggctgatcaattaaacgattcaggacctgatgatgcctgaaacaccaaggcgtcaagacatctaaagtttcagggttgaatacacgatcagcatgcccataaacgcgagtacgtaataatttttcccaatgtagttcgacggcacgggcctttggacgttgtccggtttgggccatgaccagatcgattgcctgacgtaaggtgtcgcctgttccgcaattatcatcaataattgtcacggttctccctgatggaattttgcgcccccagagatggctgcttttgtgagacgtatcatcgtaacgtgagactttcactaaattgagctcactatcccatgctgcggctgtgactgccgctgccgctgatcctcctaacatgatgccaacaacagaggagttggggcatttgtcaatttgggctgcggccaaagttaacagatgattatccccttcaataaatggtctgggcattttgtgttccgtagccaacggcaatttcaagtcatggatcggcgagggtgaaaaagtaaatggtgtgcccatcagcgttgagctgacgacttttgcacactctttgatcccatcgataaatgacacaatatcttcgttaaccgtctgcggagaacttaataagctatcaacaattctgagcaattttgccaagctatgatcggccaatatgtattttgatggggcagtacacagcttatcgctacactcaagttgagcgatgtattctgtgtaatatttcgccgtcatcagtagttcgtgacaagatttttgttcgtaataggctgcaccgcgggatccgacgaatgctggcttctccgtgagtaaaccaggcagcgccatcacttctttagttaaatagtctgtttcaggtacgccgcgcaattcgcccagtaaaccaatagagcgaagatccaatgtaggagataaagattcagacatattcaacgtctcggtgattgtgttgcagcaagggcatcttcgagaggaaccttaccaatatgtagcgcttgaccaagaatggcaccctcgacaccgatagtagacaaatcggctaaagcgcggagatcatccaggctcgatacgccgccgccggcaatcacgggtgatgacgttttcgcacagacttcctgtaatagcgtgaagtttggcgaactcatcatgcctccccgctcaacatcggtgacgacatagcgttgacaaccctgtttgtctaggcgctcaaggagatcccagagattgcctttgctgacattccatccatgcgttgccaattggtaaccttccgatgtgctttttacatccagagcaatggcgatcttatcgccatattctgcaatggcttgggcacaccaatctggattttctaatgctgcggtccccaaattaactcgctggcatccagtggctaatactttgcgcaagatggtttcatctctgattccgccacagacttgtacgttaatatcgaccgcagccaagacatcagcaataagatggctgtttgagccacgtcctgacgcagcatcaagatcaacaacatgaatccattttgccccggcattttgccaggctagtgctacttctgccggggtacctaaaggtctccgtaatgttgagctttcacctcgggttaatcgaattgcggaattcgatgtcattgctattccgtcaacaatatccaccgagggaaatatctcgaatgtttccttacttatcattaaatgcatcctaattaattatacccgtcgtctttcaagttgcctctttgttggctgcactcactcaccccggtcacatagttacctatgctcccggggattcgcgcccttgccgtcgcgacgcatcttgaaatctataaggtatataaataaattaataacgttttgtgattaatgaaattacaagttgtaatgcaataaatatgcccaggaatatgagggttaatttaatgagcttaataaccgttcatcgactcataatagaggaaaggaaaaatttctcaataaggttattagctaaatataacaatttggataactttgttcagctaattaatcttatatttacttaagaggggttaatttaggggaaggtaaatagagattcggattaaatatataggaaatgaattatgctaatgtttatagggggagtttcgtgttgtttatctaatattttaattattgaaaataatataaatctgtttttttaggtaatgattttaatatattctaatttatctaaaataaataacattaataattaaatttattaaagtggttaattctaattataagggaaatataattaccgagaatttaaaatagtaaccgatgattaatatgcaattacattctattcatttcgtggaattattttctattttatatattgtatataaacatgttgcataggtgatttttataaaatagtttattgttgataacaatcatttataatataatttcatttgtgattctatatggttgtatatacccaatggatttcaagatggatcgcggcggcaagggcgcgaatccccgggagcatagataactatgtgaccggggtgagtgcgtgcagctaacaaagaggcaatttgaaagataacggggatattttaatcattcaaatatcgagtcgcttagtttgccattttttagatttccaacgccagatgttagtgagcccacgcagccattcatcacagaagaaaccgatccagatacctaaaatgcccatttccattttgatccccaaaaaatatcccactggaatagcaatacaccacataaagaatatggccgcatatagtggaaaacgcgcatcaccggaagcgcgtaatgcgttcaccataatgatattcgcggtacggattggttccataaaaacggatagcaagaatagcggcaacaacagtttgataatagcttcatcttgcgtcagaaaatgcagaatcggcattctcaacagccagaaagcagtgaccacgccaatagtgacgatacagccgattttcagactattaatgccacgaatataagcatcttcaaaccgcttagcgccgaccagatgaccaaccataatttcattaccaatgctggtggcaatgccaaataacatcacaaacagtgatagctggaaatagagtgtttgtgctgccagtgaaatttcacccatcagtccaatgaatgctatggccgccatatattgcagtatccacacgacgttttcacccgcagcgggtaaaccgatatataagattttgcccaacataccctgtgaccagcgtaggaaacccgccagcgtaaatttgatccgcaggccataactgagcagacagaataataggatcacggcaacaatccggccaaagactgtagaccaggcgacgccttccagaccatatttaggtaatccgaagaaaccatacaggacgatcatattacctatcactgtcagcaagttagcaatcaaagtaacatacattgccggttttgatttcccataaacccgcaaacaagcagccagaataatcgaaatagcttcggggataagacagatacccagaatgtgtagatagttaaaaccatcttccatcagatgttccggcatattcatgatagacaagatcttatagccgaagaagatagtaatcagcgcacagctaaacccaagcaagaagttgaatgcaatagaaatatggatcgcctggctggctttatcccgtttgcctgcaccaatatattgagcaataacgacactgcaaccaacactgataaagttgaagatagtgataaacagatcaaatacctgattacctacagccatagcagccagataagaagtagaaacatggctcaccatataagtattaattaataaagtggccagatggagaagaatatcaataaaaatcggccagcttaacgaaaagagcgagcgctcagtaacatcagtttgatgcatttgaaaaacctacttattgaaaaaggtaaatgaattatttcttgagatgccgcatactcagaaaatattcagatattgtacatggtttatttatccgttaatagagatgaggtatatactcgtcatctttcaagttgcctctttgttggctgcactctctcaccccagtcacatagttcgctatgctcccggggattcgcgcccttgccgccgctatgcatcttgaaatccatgggtataatgaatcattaggtaattttatttaaattttatttatgattttatattgctgaataattttgttggattatgggattttccaaatctgatcattcagctttttatgataacttaaacgatttatcaacggagtgataaaaaaatttttgtggttaaattttgctctataattaatttaaaggagtcgaatataaggaaatgaaaatataccattcagcgaggtgatatgatgataaatagactacaacaccagttacttttggcctttttaacgttgactttcttttctgctttttctacatctacccatgcttgtatattgtacccgcactttcctatatgtgcggtaaaatgcgttatcttttcatctcatactgcaacatgtattatcggttctcaagcacctaatcatttagcttctaattatccaatgtctattggaactgaaaaaaatagctaaccgaaaatggaattctattgatattcagttagcataattattgtgtaatattattgtgtgatattatcgcgttatgcggaattctgcctctttttttcctattttccgccctttaataaagggcggttttttataaagctattttttattcctgtaaaaatcgggtaaataattctattaatttttatgttatttaatttgttcttttaatcccttatggggtggttttctgtgttagtaatctatttaattgatatggttaattgtattgttatatttattaaaatcaatttattatctgtttttcttgttgatttatctgattcattaaattgaatctatatataaaattatatttctgatgttttctatttttgtggaattggtcacggataatttaaatattatctatatcttaatggctgattttaatcagggaataagttaattttatgatttctatatttttacgttattattttatctattcttgtaatatgcaggcatggtttaatgtcgatcaccgtatttctcattttttccctaattaactgttctggttatatttaaaattaaatcttgtaatcactacatttattttggcgtatttctgtcggtttttggaaatttgtctgaattatgtagtatagccaattattggataaaaatatatatgaaacgtattccagaacctttccgtattaaaatggtagaaaatattcgcatgactactcgtgccgaacgtgaaaaagcattagaagaagccggatataatccattcttattacccagtgacgcggtttatattgatttgctgacagattctggcactggagcaatgagtgatcgccagtgggcggggataatgatgggggatgaagcttatgcaggttcccgtaactattatcatctatgtgataaagtcaatgaattaattggctaccaatatactattccaacccatcaagggcgtggagcagaacagattttatttccgacattaattgctcgtaaaaaagcgcaaggtggtgcaacgcatccggtctttatttctaatttccattttgatacgacagcggctcatgttgaattaaatggcgcgaaagcgattaatgttgttacgtcaaaagcctttgatacaaccacctattatgattggaaaggcgattttgatattgatgaattggaaaaaacgatagcagaacatggcgctgataatgttgtcgcgattatcacaacggttacctgtaatagttccggtggtcagcctatctctctcgctaatatgaaagccgtgtatgagattgcaaagcaacatgatattcctgtggtgattgattcagcccgtttctgtgaaaatgcttggtttattaagcaaagagaaaagggttatgaaaataaatccgttaagcagatcgtcaaggagatgtatcaatatggtgatatgttaaccatgtcagctaaaaaagatcccttggtcaatattggtggtctttgttgtttccgtgatgatgaagatctctttaatgaagtgcgtacccgctgtgtgccaatggaagggtttgtgacttatggcggtcttgccgggcgcgatatggaagcattggcaattggtcttgaagaggggatgaatgagggttatctggcatatcgtattaatcaggtggcttatttaggtaatagattaagagatgcaggtattcctattcaatatccaaccggtggtcatgctgtatttgttgatgctaaattattattaccgcatattccaggggaacaattccccgctcatgcattgaataatgaattatatctggaggcgggaataagaagtgtggaaattggttctttgttattaggtcgtgatccaaaaaccggaaaacagaaaccatcaccgatggaacttttgcgattaactattcctcgtcgcgtttatactaatgatcatatggattatgttgtagaagcctttatttccttgaaggagagaattcctcagattaaaggattaacgtttacttatgaaccatccgtattacgtcatttcgttgcaagattaaaaccaattaaataataaagatcgggatgctcccttgtttaagagcatccccaattttactgcttactatatataccctatagatttcaagataacgggtataaagccacgctagggtaacgcatatggctactttgccgataaaaaaatcgtctccatctttatttggcggtgccatgatcattggtggaacggttattggtgcgggcatgttttctttaccagttgtcatgtcaggggcatggttttactggtcaattgccactttgatttttacctggttttgcatgttgcattcaggattaatgatattggaagccaatcttaattatcgaattggctcaagtttcagtactataacaaaagatctgttgggcaatggttggaatatcattaatggtattacccttgcttttgttttatatatactgacttacgcttatatttccgcgagcggatcgattattcaacatgctatgcgagaagtatcgatagatttttcacctgggtttgctggttttttatttgctcttgtggttgcatttattgtctggttaagtactaaaacggttagccggatgacgtcgattattcttggtgctaagatattaactttctttatgacgttcggcggtttggtttataacgttaaaccagcggtattgtttaatacaactgaagttaatccaacttactggccttatgtattaatgactttacctttctgtctggcctcctttggatatcatggtaatgttcctagcctgatgaaatattatggaaaagaaccagagaaaataaagagatgcctgtttattgggacatcaatggccttggtgctttatttgatctggttgattggaacaatgggaaatatttcccggcctgattttgtcgaaatcatcgcaaaggggggcaatattgatgttttggttcaatcattaagtggaggattgaacagttctgctctgggtttattattgactcttttttctaactttgcggttgccagctcattccttggtgtcacgcttgggttgttcgattacctggctgatctgcttaaatttgatgacaccaagctggggcgctttaaaacggcattagtgacgtttcttccgccaatggttggtggaatgatttatccgaatggttttattcatgcgataggttttgctggccttgctgcaacagtttgggcggctattgttcccgcattacttgccagagcatcccgtaaacgatttggtagccctatgtatcgagtttggggaggtaatgtgatgatcggcttgattttgctatttggcgtactaaatgctgcggcccatatcttgtcaaattttaacctgctgcccgtttattcataaaaaaactcctgcggtgggggccgcaggagcctggtgttgacggaaataagctccgaaagggagagaacaaagccggtatttttatgtgttaatttagtttgttaactcctaacatcttatagcaaggttattaacaggaagttcttatggcttccctttagaacacgaatagttaactgctttaatttcttttagtgcaacgtcctgacagacatgtcgtaaattcatctctgatagaacaatagcattagaatgccctcttttggcaactttttgcctagtcattaattagttgtatataatctttcagtgtcagtgttgtttttgcaacggtattaccgccggcgctaagccatcatttgccggtattctttaatcacttgttggcaaaaatcaggtgaatttatatgatgagggcttttaatcagttgtctgttttccgtttctatcaatgttgcttcaaaagcattgataaatgattgattagcatcaggattccagaatggcccatctttaatatccagagcagaaaaaccaccttctggaataataaattttacttttccttcgcattgattgagtttttcagcgatccaaattcccatttggcggttttcttcgggtatagtgcgcattaatgttacttgcgaattgtggcggtaaaattgtcggtatttgtagcgttccgggatagaatttagatgaccgaaattcaccatatccaacgctccgcaagagccaatataaggtatttgcgtgcgggctattgcccccagacggtcagcatcacaggcaagaacaccaccaaacagatagtcgcagacttcagtggttgtgatatccagtagactgtaaagcaaacggctttcggcgagtttttccattgtcttaccgccgctgccggttgcgtggaaaaccagacaatcatactgttgttccaactctctggttaataattgtatacaaggtgtcgtcacgccaaacattgtcaggccgatagccggtttatcttcaatagtgttctcttcgtgaaaatagactgcccctgcaatttggttggccgcattttttaatacctggcgagagatacggttaagaccagagacatccgtgactgaatacaacatagagatgtcgctaacacctacatagccagaaacatcgccggaagccatagtagaaaccataagttttggtatacctaccggtaaagattgcattgccggtgtaatcagtgctgtaccgcaggaacctcccagacctagaatggctaaaacatcaggttgttttgataaaaagagattgaaggcgactgacattgcggaaatggcttgcccctgatcaccacagaaaacagcttctttgccttgcgggtgatgctctgctactgtttgggcggtaatatccgcacctctttgcggcgagtcagattgagtagtcaaatccacagttcgaacggcaaggcccgcttttttgatcagatccctgacgtagaaaatttctgtgcgcttggtatcaaaaatagtagcgatataaacatagccttggctttttttcattataattatgaatacttccctggtgctgactactcattcatggacagattatagtcaagatgagactcaagtatcactgttgtattaccaaattgagactgtcatctcattttattgataaataaaatgaatcaatttggtcgttttgtagatggttgagtagagtgatgatagcgaaaaaatattttaaccataagtgttaatataccctatggatttcaagatggatcgcgacggcaagggagcaaatccccgggagcatagagaacgatgtgaccggggtgagggagtgcagccaacaaagaagcaacttgaaagataacgggtatatagcgatttttattgtgaagagttatggcaatgatagattcgaagacgaaaactcattttactggtactcggaaaaaaacttatacattgctaatcaatgcggcattggcgctttttgaacagagagcgataccttcggtttctgaattggcaatgcatgctggtgtttccagagcaacagcataccgctattttccgacacaaagtgatttaattgatgcgattgttggtgccagccttgggccgatcctcacttggaagcctgctagtgaaaagactgaggagcggattacggagttgttggactttgcttatccccgaatgtttcaatacgaaggtgcattgcgagctgctctgttagtttccttgcaacaatgggctcagggatgtttatctgagggtaagcaggaaaagaaattggtacgtgggcatcgtaaagatatcctggcaatggttgttgaaccattaaaagggcattttccgccggatattttggaaaatgtcattcggtctttttccctaatttatggctccgaggtctttctggtgatgaaagatatctggcagatggataatgcggaaattattgagatcactaaatggatggcaaaagcgataattaatcaagcgcacagagattctgaactataggtattgtttataggcattgtttataggcattatttataggtattatttataggtattatttataggtattgtggtaagtcaaaatttagtcacaacctttactattgacgaatttttctggtgtggatattttgtctaatattttatataacttacggttattcctatgaaaaatatttctgtttatgatgatgtcattgccgccgcccggcgaatagaagcttatgcttaccgtacgccagtcctgacttcccgcactgctaatgaaatgacaggagccaggttatttttcaaatgtgaaaattatcagcgaatgggagcctttaaatttcgtggtgcttttaatgcgttatcacaatttaatgatgaacagcgccgcaatggggttgtcacttattcatcgggtaatcatgctcaggcaatttcattggcggctcgtatactgaatatttcggcgacaatcatcatgccgttcgatgcgccagtggctaaggtcgccgcgaccgaaggttatggtggcaaaattgttttctatgatcgttatacggacgatcgtgaacaaattagccgtgaattatcagaaaagcagggattgaccttaattcctccctatgatcatccgcatattattgccggacagggaactgcggcaaaagagttgtttgaagaggtcggtgaactgaatgcgttgtttgtctgtctcggtggaggagggctgctttcaggcagtgcgcttgcagctcgccatttctctcctgaatgtaaaatttatggtgtagaaccggaaaccggtaatgacgctcagcaatcatttcgtcagggcaaaattattcacatcgatacgcctaaaactattgctgatggcgcacaaactcaacatcttgggcaatatactttcgatattattcgaaaaaatgttgatgatattttcactgtttctgatgaagaattggtggatgcaatgcgattttatgcagaaagaatgaagatgattgtcgaaccgaccggctgcttgagttttgccgctgcccgcaaaatgtgtgagtcattgcgaggccaaaaggtagggattattgtcagtggcggtaatgtggatatcgaacgttactgctcgttgctggcaaaacaaccttagacgtaataagtcacgcagaaggggctcttgatattcgcagaacttataatctatgtttgaccgtgtaattattgctttttgtatttgaatattaattatatggctaatattatatattagctgttacatgttttttgttaatgtttcacggtattatattttcattaatatatgttatgcttatcatatatatcctaattgattgttaatctattagggtaaattgaataatatatattttacattcgacttatgggtatattattgaattaatatgatggcggaagctattatctaatacgcttcctctaataacagatcttttatgacgtctaaaataggtgattatatggccacggaagatagcattattgatgattttaacggtaaaacaaagactcttggatgggatattattgctgcctatgatagaactaaaataaatatgctgtttgaacagcaatatgtaagaaaagtaagtgaaggtgcacatttttcacctattttctgggaaagcgaaaataaaaagataaaatttgacaacttgatattgggagtaccgttaatttcctttgaaaattcatcaattgaaggttctcaggcaacggtaaaattaaattttatttctggcacgataatagaactttatgatgatggtagagtaaagaattatcaaagaattaccccgaataataattaccatatgacaataaccgtagacttgattgcggcgacaggttctgttgataataatgggaaagttgtcgtggagtttaaaaaaggaattttgggggtagtcaatgttatcaacgatgcgccagcagaagttaaggagtttttccgtaattggctcaaagataatgatgtcacttatgagttaggtattttgaagctggataatatggttggactggttccacaaatgtttaaaatcagaacgcaaccggcacccggtgctaatttatatggttctgataattatggtcatggggcagtgttgttatttattgcaacaaactataatcctaacggtggagtattaccaactagctcaagtaattttccttatttgataccagataatcgttctgcgatgctaattatcagtaataagacactttttgagaatattcttaagccgcaatatgagcgtttattacctagcccaacgggtgtaaatttagaattagttaagttagatagtcaggcggatgattcagctagctatttgaagataacaaatgggtatgctgagagcgatgaacctgtacaatatgaaggaggagggtataaagtatggacaggattgtctaaaggtgaaactaatatttggctggagaaggtaaaaattccttattctgggatgtatattaagcctgagaaggaaaaaattatcttttctggggaggataataatggtcactcttatcattttatccaaacatttggtgttttttacgattcagcaataagtggtggttggaacgactctaaaattgatttttatattgatggttcaatagatattacgcctcatgtaaaatctaatgatgagattgaattaaaattaaataatagaatgagcaccagatatgacaaacaagatgaacctgtttggggaatacacttttatcctaaagaaaagtttgttaataaaacagcagaagttgttaaagatattgttgaaaataatttatccaacgttgcaaagattaaattagatagcattagcctatttgcagttaatcatcttctttttcctgaaagcaattatcttgaatttgataaagtatatgtgcctggggatatggtgctatttggtgatatttccccaacatcaactgcatttagaattaatgatcttcaactaactataccattgaaagctaagcataaatttacaaccaacaccaaggcaacggtaaattggtctattactccagcagaattggggagtattaatgcgaatacaggagattacatggcaccgactaagataaaagggaataatcaaattgtgacaattactgcgacagacccaaatacaaacgctaaagcttcagcggttgtaattttggtgccttcctcagtatcgattagtccttcttttgttgttatcaatgaaaatgatgttaataagaatgccaattttactgtttatggcgataaaaaagtgaattggcgtgtggaaacgggtactggctatggtgttgttgatgcgaatggcaaatatacgcctccagccgctttcccggctggatataatatggttacggtgacggctgttgctgataatggcgatttagataaagttaatatcctgcttatcagtaaaaacacgaaagctgagttcacgattaatcctagctataatcaagagttattaacacccgatgccgtaatgaaattctcttctgttggtaatgatttgacttctccaagtgaatggagtcttatgccagaaagaggaaatattaaggtaggtgaaccagaagtcacaaaagatgagtttggtaatgacatcgaaaagtatactgcaacttatactgcaccaagtgatattacttgttcagaaattgttttactcagagtgacacataaaaataaacccaatcgtgcgggatatgctttgattacacttgagccgaaaatcagctaatcgttaacgacttttaataaccgccagatgatgcaataaatttcttattatttattgcatctctgttatctaatttattgttttttttataaaaaaatattcatcctgtatataccctatggatttcaagatgcatcgcggcggcaaaggagcgaatccccgggagcatagataactatgtgactggggtgagtgagtgcagccaacaaagaagcaacttgaaagatgacgggtatatttccgataaataaaggcgatcctatgactaatgatatcagcccgttgttaaagagattaggtgataaatataacttcaccgataagataattgaatcaggttataaatctatttttgatattataagaacaccccgtcatctatttttagagaagtataattcaaatcatcaggtagcagatatttatgatacagcaaacagctatgctatacaaatatcccataaatttcgccagcagcattatattcataatacatataccagtcgtcaagtggaccgtaaatttctccgccagcgttacgttcataatacatatgccagaagttattcttctctttcattaaaagaagttcctcaatatcaatctttatttcaggataactggcagcaatattgtccaaatggcgcaccggaagcgaataattcaccggttgcttatttagcagagatttataaattagcgatggatattgaatccaatgcggatgctgaggccattaaaatagatgagcgccgcgctgatttagcgcatttaatgctggatgaagtgagtattaaccaggagatttcagcactgtccttggttaatactatgctaagtcaacgtttggaagctatgttaaaacaacaaggaaagacaaatttatccagttatgatcttttggctaatgtacgttatccatttcaacttccttatgattatgcacaaaaccaaattaatctaacatttgataatagaaaacttttttgtttgaaaatgatgcaacagacagataagagttatccttattttcttaaatccaatctgaatactgctaatggagaatttgtcacacctttagcaaatcagctaggtatttcccaacaaaaaataatcaatgagccgttaaaaccatctaataaacaattctatcgggataattacggtgttaatagtgcaggcttacttgaattgttatcgatttttactgcacaaacggctctttctgtcgcagaggttgagcaattattatgtgtgaaagggatatctaccaataaaggggggacattagagcaaaataatgtgagattatctcaaaatgtgcttaatttaggtctacctgcggctccttatcattatggtgccgtttttattaatgggccgaaggcaaaagagagtgatttcctacatttgtatcgtgagtttgtctcaaatgataatttaccacaagcggtaaataaattatcaggtgtgaatcatgaacgctttgataggctaaatcgcatgatacggttgtggaaatggattaaattgccggtagataaaattgatttattggtgacggcaacgatgcgggcagaaggggatgcaaataagcaattacagatgaatgagaataccttacgtatgctaggtattttccatcattggagcaaaaaatatcatatttcacctgatgattttgccgcgttgatatatcaaattactcctttttcgatgggtaaagatattcctttctttgatcagatattcaatttatcttcgctatttgatgcaccattggtgattgatgatcgtgagttttattcagagaaaaaacaggatgataatatcattaataagttatgtgctggattgaaaattaaagaaaaagatttttctttattagcaccattagttgctgaatcgatgggtaaaaagagtttaacatgttcactttctgttgtttctgcgttttatcgtattgtgcaattgtcgagaattttagggttaacaccacaggaaggtgtggttattttaacattaatcggtggaaataaagtattaaagcaggtcacgggtatgccttatttatcgcaatcaggaaataataggcaaacagatattttggatattatgattgcaatggagcaaaccatagaatggttgagaataaataaattatctgttggtactctgcaattattcttattaccggctaatgaagttattatgacaggaaatgcggcgcaggtggcctttattaatcaagtgggattgcatcgtaattcggaaattttaactctggaaagtttatcgtcaaatatcttaccagcattagacgataatgataatttgattgattggttaactccacgtcaaactgttttaaatgcagtatctcatcaaaaatatggtttagttaagcataatgttaatattattgatgaaattaataaaacgataaaaagtatattacttgatgataaaatcaaagtatctattactgagcaatgggctgcaattattaatcaagctcaatctgcacaaaatgcaatatcggccagtatgttggcaaatgcatttcagctatcacaaccgtttcctttatttattctaaactggatcggctcaagtagttatgattttttattgaagtcatttgaactgtttgataagaaaaatttacagccagagatgatcagtcaggattatttgatactgatgtatgatttatcgcgatatatttcagtgattaagactttccgactgagtactgtgatgttgcatcatttttctgaacatcctgaatggtttggctgccagaacacgcaactttctttgtcggttatttattatttcagtcgctaccgagattggataaaattagttgcttctttagataacgcggaagataaaatattgcgttatttggagttagttaatacgaataatcaaagtaacgataaaactaatatggtgaaaatattaactgaactattgtcatggcagcgtgatgaagtgctatcagctaattcacatattattggcaaggaagataatacagcaaaaacattggctgaaatagatatcatgatgagacttaaattttggtctgaggaaatggcactttccatgcattcattattagcaacgataaatatcaatgctcattcctcttatcaggattataagcaggtcggtatagcgatggtagcaactctgtaaaagtaattgtcatagtggaataaaaaaattttaatagaggttcaggatatgaaaaatattgttgctaaaaaattagctgagagtgttcgtgatggattggttggttattacttggggcatatttcaaaaacagataatgtacctgatttaaaaacgccggatgatttgtatcaatatttacttattgataatcaggtatctagtcaggttaataccagtgtcgttgcacaagcgatttccagtgttcagcaatatattaatggcattatgcttaacatggaaccagggtatgattatcaatatgaagataaagtaaaaacatggaataatgttttaagccaatataatatttgggctggttttcaacagttatctaattatccagagaattatattagccctatattacgccatggtaaaacaagtgattttaaagagttggaggataatttaaataaaggtaaattgagtgatgaggttgttcaggaagtcatattgaattatttgaataaatttgaagaaataagtaatttagagctgatgagtggctatattaatgcgactaaagaattagctcccgctcaggctgaatattattttattggtaagatgaatattacgccaggtcaatattattggcgatcgctgaatatggctaatcgaaatgtgcaagatgtcattaatcctacggcttggaaagagtgggaaaaaattggtattcctgctactggggaagtgattaagatccgcccagtcgttattaatggtcgtcttcatatcgtttggttggcacatgaagcagataatagtaaagaagaaaattattatagtattaatttgatatatcgaaaatttaatggtgaatggagtcttccaaataaattacggacttttacgggtgataagagtaaaattaatgatagttttgaactcattgcattaatggatttgcgagctgagcctgtattagttatttctgctatttgtaagccagtaaaaacagaaaataatacatcgggagaaaagaattatccgtactcctgtaatttactatttaacgaagttcctgtgcctctggtgggtgaaaagtcattagatctctatatctatcaacagattaaatctaatcctacgcaagatctgacacaatcaaatatgttgtcagcctattttggcgatgcatataaattagttgataagcctgtttatctggagtcaggaagttaccctgggcttgcgacaaagaaaatgacactatttgctgaaatgggtagtggaaaactgcgtctcagtggtaataatagtttgtcgattgggaaagagattattagatctgtagcatgtgatattaatcttaaaagtaaatcgagtgaagcaggaaaggttaatatttcactcgcggatggtgctaaagaaaacaatggaaaaataacagtttctgtcgcggtgactatcaatgataatagttatgcatcaggtgactatttttatattatgtttaattctagtcagagtggttatcctgagttgaatgttaatttttctgaatggggacaaaaacaaggtaatgtttatcattttactaaagaaatggaagtgcctctgtctggattacaagaagctaaagtatttagttccgaacttaataaatcgggtggtaagcttgttgcttctggagagggaacgccaaaaatagatattgatcattcaggttctagggaggccgatttctgtttatggcatactaacggggggagcgatagcctgttatattcagaacgccaattactcaatggaaagagtattatttctactgtagaacttgatctcgataaaataaatggtaaggattcgagtgtatttttaaaattaggttataagaaagagggcgaagatgcggacttaggttataaccattatgaagttaaactaagtaaaacttcctatcctaacctgctgttgacctataataaaaaaacgcaagcacagtatctggatattactgaattacaatttaaatatcgatctatcagattaaataccctatttggcaaggagcttatttcacgggctaacaattctattgctgatgtattgagttgggaggcgcaaaatattaaggagccgcttattccggggggtggtgaaaataatgattctgcgcttaacggggcaaatagtatttatttctgggagcttttcttccatgttccttatttagttgcgtatcaactcaatgcttcacaacaatatcaggatgcccaaaactggttgcactatattttcaacccaggagtaaaaaataaggctaatggtagcccaagctattggaattgcagcctgttagaggtttctcaagataactcagtacaattaaaaagattacaagatccagatgcgatagcttatgccgatccggtacattataagaaagccatatttcaaatgtatgtacagaacttaattgattttggtgatagtttttatcgctttctgaccaatgacggacttaataatgctaaattacgctaccttcaagcacagcaattacttggccaaagacccgattttgatttagttagtcattggctaccgcttgagttggcagatgtcacctcttcaaagaataataaattacgcgaatttgagagtaatattgatcttgatatattaattgatcttccagccactaaagtcagtgcttatacggtggttgataatgcaatattcagagtccctttgaacaatgatttactgtggtattgggatattttatctagcagattttataatttgcgccataatttaactttagatggtaaacctttgtcgctaccattatatgcaacaccggtcgatccaaaaaatttgcttgctttactggcaaacggtggatcgttattggcagcaggcagtaccggtattttgaatataccgccttatcgtttccgggcattattacccagtgtttatcatgcggtagatacattaagtcattttggtgatttacttttaagtacgcaagaacgtaaagattgtgcggaacaggaagagttgaatcaattacatttgaaagagttagctattttcgccatttcattgcagaaagatgctgtcgtaattgctgaaaaaggaaaagaggcattattaaaaagtcagcagacattacaacaacggattgatcattataaggcgctttatgatgaaaatatttctacagatgaaacctatgctctgaatttacaaggtacggcaaaaattatttcttctgttgaggaaggaatgttaaccgccgccggtgccgcttcgctgattcctagcatagcgggaacatcatttggtggacaacaatggcatatgccgcttgtttgtactgcgggtattacacgtactgcatcattaatcatgcaaatggcgagtgatacgttgagtgttaaagcgggttataaccggcgacgtgaagagtgggaaattcaatataaacaggcggaaagtgagctggaaatgttgaaaaaacagattgaacagcaagaggcacaaatctccgccgcgaatacaacattacaacaatctcaggctcaactgcaaaaagagcaggatatgtatcagttttttactgtgaccagggtaacgaaatcttcgctttatcaatggctgaatgatcagatgatgtcattatatcgtcaggcttacgatgcagtgctttcgctatgtttaaatgcacaagcatgctggcaatatgaaatgggggattttgccacacaatttattgtgcaaaatagttgggacgataaccataatggtttattggtaggagaaaagattaaactgaatctactgaaaatggaatcggcttatttgaatcgtaatgaacgtcgtttagagttaactaaaacgatctcgttaaaaaatctattatctggtacgaaaaaatgggacgatattcaatctgagcttaaaaccggtgagggagttacatttatactgaacgagaaattatttgatcaagattatgccgggcattatttacgccagatcacgtctgtatcggtcacgctgccgacattaatgggtccttatcaggatattaaagcgactttaactcaaacgaaatgttatacattgaaaacgccggatattaatggtgtgaaatatttactttcaaataaagagggcgataataaacaaattgtcacgaatttgagagcgagccaacaaatcgcactttcatcagggattaatgatagcggtacatttaatcttaattttggtgatgatcgctatttaccttttgaaggaacgggggcggtttctgactggaaactcactttcccatcagcggcaacagacaatatacagcgagatattctggataatttgtcagatattattttgcatgtacgttataccgcgaaggatggcggtgaggcatttgctggtcaggtaagagaactacttaaataatacatttatttattgttgtttttgtattgaatcaggaacctgataaatttatttatattgtttaacaggttcttgttattttagtcgggaattaggccatgatgaacaatacgttaaaaattgacggccatgtggctgttatcacttttgatccagaaatcgagatgtttcgtggtgaatttgtcgggttaaatggtggtgctgacttttacgcttataacattggtgagttgaaggaagagggcgctaaatctctggctctcttttttgatgagtgtaaaaaagagggtataaaaccttacaaattgtatagcggtaatgaaatcaggggcttttaagtaaaagtgaaattcagtgcgctaagcactggatttcacttttgagagagttaaacgatgggtaacgtggttaaagtgacttccggctcgcttatctcgatatgccggatatacacacctgcatgagccatcatcgcaatcagtttatccacactaaaaagttgtattttccccctagcaagctctgaaacatggggttgggtaatccccagtactttggcggcttcagcttgggtaaattcccgttttgctatccatgcattgagaatatttattagttgagcacggatcttcatgttttcggcctgctctggtgtatcactgatcgcgtcccatacgctttcaaaagtctgcattttcatgatttccgctcctgtatcagtgcgttaaagcattttttggcaagttctacatcttgcttactggttgactgtttttttggaagcagtgcagtacttaaattgctaacctgaattctagcttcaagttttttggttaaatcaccgttagaaatacctacctcttccaattctttggcaaagccaagcatttcgttcaatttagtgcccactttcacctcatactaaaagtcttggttcgagcatttttttatcattatacttcagaagttctgcgacaacgtatttttaacctgccaaatcatctttctcaggccgccatttggcggcctagcctcttgatttaaaagtcagaatcttttgcaatcaaattaaccgctatttttctcggtcaaaataaacattccaaacggatgaatttccagatagtaattatcgccaacatcgggttgcaattgggtggcgttaatctgtaacaacagagtttgtccttgccaatcgactgtgacttcatattgtggccccatgtaagccacatggctgatggtacagcgttggctaatatttccattacggctcagggtgatagcttccggtctgacgcctaccgttaccgattgccggttggtggtgaagttggctggtcgtggcaggcgatattggaaaatctcaacataatcagtagccaaagtcgccgggaagatattggcatctcccataaaacttgccataaattcagacgccggttggcgatagagtgtttgtggcgtgccgatttgcatgattttacctttattcatcaccagtaccgcatcggaaactgcaaatgcctcactttgatcatgagtaacgtatagcgaggtgatattaaattgctgctgtaattcgcggattttctcgcgcatactgcggcgcagattggcatcaaggttactcagcggttcatcgaaaagtaacactttaggtttgaggatcagtgcgcgagcgagggcaacacgctgttgttgaccaccggagatttggtctacgtaacgatcttcaaagccgcctaaatccaccagctccagcgcctctttaacccgttcgcgtatttctgctttaggctgccctagcattttcagcccgtagccaatattttcccccagtgacatatgcgggaatagagcataggactgaaataccatgcagatatctcgttgctgaatagagcgatctgtgacgtcttcaccgtcaatgaaaattttacctgcgctaggtttctccagcccggcaaccagacgtaatacggtggttttaccgcagccggatggtcctaacagcgtgaccatatgtccctgcggaatagagagttccagattatcgatcacggtgttgttaccgaaccgtttggttacatttttcagttcgacaaaattttgttgtgtcatgttgtcactccgtgattactgtgtatttttggctttggaacgagagatccgcgcttcgccaatcaggtagtcaaataagaaaataatggccagcataaccacaatcaggatcgagccataagcgatagctactccgtattctccatcttccactcgattcaaaatataagcggttgctacgcgggtgtcgggtgtgaccaggaagacaatcgcgctgacggtggtaatcgcacgaacaaagctgtagatcagtgcagataaaatcgccgggcgcagtaagggtaacagaacatgaaggatggttttcatcgatccggcgcgcaggctgagtgaagcttcatccagtgatttatcaatttgtccaagaccggcaatccctgccctgatacctaccggcacattgcgcatggtcatggagataatgacgattgccgccgttccggtgagataaaaaggtgaatcgttgaaggctagaatgtaggaaaccccagcgacggtacccggtacggcaaagcacagcatagtggtgaattcgatggtttttttaccgcgaaattcctggcgtacaacaatgtaagcaatcaacagaccgaggatcgcagtaatgggggcagcgataccggcgtagagtagggtatccagtaatgatggccatgcgccatcgtgcataccttgaccaaatagtttgatgaagttatctaaggtcagggtgtaatccactccccagttgacggtgaaactgccgtagaagatgctgccgtataacaaaatgttgaacacaacccagataaataggatggcacagactccccaaaccagtgacgttggcaacggttgtacatcaccacggtaggatttgccggaaaccgtgacgtaggaacgtttaccaatccacagatattgcacgcagaagaccagcagcgagaaaaccagcagcgaagcgccgagagtactggcggcttgatagtcgagttgagaaccggtgatatagaaatagatctgggtcgccagtacgtcaaagctaccgcccagtaccaatgggttactgaaatcagccagcgactggacaatgacaatcaggaaagcgttcgccagtgccggtttcaacagcggaataaaaacattgaagaacgtctgatagcgattggcacgcagagtataagccgcttcttccaatgagggatggatggttttgattgcgccatcaaggatcataaatgccattggcgtaaaggctagcacttgcgccagccagatgccggtaaagccatacagccagttggtgttggttaggccaaaccaggttgccataaattcagtgatataaccggaacggcccatcatcagggtgacgcctaaaccgaccacaaacggcggcgtgacgatgggtaagatggagaatactcggccaataatggcggagcggcgggcgattctggcggtataaattgccagtaccaacccgaagaaggtgcaacctgcgccaaccgccagcgaaagtagaacagagttgatgataacctgaataatatgtgcttgccctaggatcgatataaaagcaaatggggcaaactgaccggcatcatccgtaaacatcggaataaagatggcaatactcggataaaggataaataggccgatgagggcaataactgcgactaatgaaccgataacaaaactatcaccacctagccattcaaggcgagacagggctagagtaatcatcgcgcccagtgagataaacaggaaaatcgtagcgtagcccagcccacgaccgataatggccgcgctaataaccacaaatagcgcgcatagtaaggcataacccgcgtcaaaatagtggcggtaaggttgattgcggtttgctggtgtgagtggacgtaatagcagcgctgaaggcagcaggaaccacagtaagctgatgtttaatccgttccagccgtaggcggcgagcagttcatcttgagtagattcaaaaaggccgtagtccaggctccatgatggcagaagcgcgaaggccaaccacattagggcaatccaccagaacacggcatcctgcttttgtctgaatgcgtgagacataatttccttccattttattattgtgtggtagcagcagtaagaagctatccattggtgcgggaacataaagtagcctgacggatagcttctaagggcggaggtgatccgcccttgactgactttatttcgccattttcacttctgtcacccatttggtaattaactctttgcgtacatcattggcaccatatttatccatgtcgtaattgatcagttttagatcggataatttaagcgccaaaggagaagcttttgccgtggtattggtcaggatctgataagctttccctttcttccaactcaattcttgtgcttctttggataacacccagtcaacaaaccgtttggcgttgtccatgttgcgggcatttttgatgatacttacgccgccgatttcataaccggtgctttcacatggcgcgataagtttcagtggtgcgccattttctacttctaatgagtaatcatgcaggaaaccgataccaatcgcagattcgccacgggcggcatttcgggctggggcaataccggatttggtgtactgagaaatattggtattgagttttttcagataatcaaatgcctgatctttgccccataattgaacaaaggttgccaacgcggtgtaagcggtgcctgaactttgaggatcggcaatctgaatttcgcctttatatatcggtttggtgagatctttccagcaggttggaatcggcagatttttctcttttagacgttcagtgttgacgccataaccaagaataccgacgtaaacggcggagctgtagttgcctttgcgtttagccgggtcgcggaactgcggcatgatttgtgtcagattaggggatttataaggttctagcagatccatctctcccgcttgagattgtgggtccagagtcccgccgtaccagacatctgcttgtggattgcgtttttcggcttcaatttttgccagagtactgcctgaaccattacggacaaaagtggtttttacattatatttttcaccgaatgctctggtttcagtttcacacaaggcgttagtggcgctgcaataaacgatcaaacgtccggcggcttgagcgctattggtaaatgcagcaacgaccagaccggctgcgataagtgtagagagaggtttcagtttcatcattttatccttatattcaaaactgcttattattggaaagtcgcgatgctactccatgttcccttttactcacgtctgccattaacattggcatcaacagcaaacccatcatggcggctgcggcggtgagtagggcaaacatcccggaccagccgtagtgggcaaccacctgacttagcggccagcctgcgattgctgcgcccaaataggcgtacaatcctagataacccgtgacggtgccggcggcttgtttatggcaatattctgttgcagccagcccaatcagcatttgcgggccaaatacaaaaaaaccgatactgaaaaaacagactgccaacagcgtgtagtgatgaatgggagtgagccacaatgcggtgacagccataaatagcccaagagcaaacagcagaatcattggggcgcgttggccgcggaacagtaaatcagatccccaaccggaaaatagcgcaccggttaaaccaccgagttcaaacagtgagagcgtcgcattagcgctgagcagattggcaccatgtgtttctgacaaccacaggtttccccaatcgttaatcgccattctgatgagataaaccagaatgtaggagcatcctagcaaccagatagttctgttagttaagatggtatcccgcagtatctgcatcatcggcatggggtgcgatagctgttcatgtcgaagctccagtgaatcctgtcgccactgtcctacactgggcaaaccgtgctgttgtggggtgccacataactgatagcaaagccagatgcctaataaaatgccgataattcccggcatcatcagcgctgtttgccagctataagttgtcgccagaaaagcggacagcattgggacagtaatgccaacaatattgatggagatattccagtatccccaccagaagccgcgctcattgcgggagtaccagtgtgtcagcaatctggcgcaggggggccatccccagccctgaaagaagccgttcagtgtccaaatgatcagcagggcagaaaatgatgaacagaaagcgaagataatgtttaacacacctgtcatcactaatccggcacccataaaccagcgatagccggtgcgatcatgaaatacaccggaaataaattttgagctgccgtaagccagatagaacagagtggttatccagccaatgtgtcctttatccagtcccagttccaactgcataaccggcatgacaaagttgaagctttttcgcgtcagataaaatgcggcatagccaatgatcatggaaatcagcaaacggctgcgccagcggcgatagtgttgtgaaatctgttcctgactggtggcttgcatacccggctcctccatgagaaggaaatataaagaaaggttgatgaaaatggatgggataaggttttaggcaactaggaatcattcttagttatgcctgattttcatcagaatttgtgggcagcttaacaattatacgcgtgccgttatcattgcttaactgccaatcgccacctaacgcacggatacgttcttcaataccttggaggccaaatccaccttttcttttatcttctgtaatgccgatgccgttatcactgattctgagttcaatcacatcccggtgctgtcgcaggatgatagcgattcgagtcgctttggcatgtttgctgatattgttcagtaactcctgaaccagacggtaaagggtaaaaaccaccgtttcattggttggattttgcggaagctggtaattcaactggcaatcaatatctcgttctttaaatgccaattcatggatcagatggtgaagtgctttttctaaggacatctcttccagaaccggcgggcgcaattggcgtaataattgacgggtggattgatgaatttgttgggccaggttattgatctgttctgcgatcatttctgttgccggggtggtggcggtacgttttatcagcgttgcctgaatttgaatggcagtaatattctgaccaatttcatcatgtaactcacgggcaatacttttacaaacgtcttcttctgtgtgaaccagtttcttcatcagattatggcgggcagttaactcctgctctaagagttcacggtaacgttgtaaattttcagcgagctgttgttgacggctgatggctatccccagacctatgcctaataaagcctgaatagtcaggaacatttccagctcacctaaatcgttaaaagcgccactgaattgtcgagctgatgtgatcattaggctcccgagtaaagccgccagtacgccgccttgccagccgtagcggtaggccataaagacattagggataaatatgagaatcaccaaaaggctttcaatttctggtgacataaagatctgggcgctcaatcctagcaagcagaataggcaacaccacatcaacaacgaagggcgtaactgcggatcagggtcactcggttgcaacatattttttagatgttgctgacgtagatattcatagatcagataaacaaaaggtgacaataaaacgccaccggttaacgaggtgagaaacaggtggctggcaccggcagtcagcgtaaatcctagacaaatagcctgcaatacgctattggcggcgacgccagccagcagaattgagagtcgttgccaatataggggatagcgccaccaaaattgttgcacgataaaggtgggtattaggctgagaaagggggataacagaatgatattgtgagtaataagttgttcgctgctaagccatagcaaaatggtaatctcagtggctaacaaggtgggtaagtaacgacgccccagtaggataaacagcgctagccgcaacccttgtggcagaagtagtgcagcttgttgcccattgtcattcaggtagaagctgatggtccacagagcaagccagctcagcgaataaaaaatcagcagaaagagtgataacaggccaaatcgtgatcctctgttcatggattccccatgagaatctggtgttgcagagcgtaatggaccagatcaatggtgctatcgcactggagtttgctgagaatattggcacgatgcacatgaaccgttttatgactgagatagagttgttctgcgatagttttaacattaatgccattgatcagcagatcaaatatttcccgttctctgggggttaggacttgcagtgctgtaaccttctgtgatgtttgacgcagtgcttttagtgcatcggcacacaaatagcacccgccttgatgtacggaacgtactgcctgtactaattcttctgggccacatcgtttggtgaggtagccgcaggcaccggcatccagcgcactttgaacaaatgctgtggtgtcataaatgctgagaataatagtgcggaaatcaggccgtttttgccgtaaccgggtgagcaggtgcaaaccactttcatccggcatagcgatatccatcacggcaacatcaatcgggtttctgagtaaacccgaccaggcttctttggcattggcgtattgcccgacgatttcaagatcattctcaagcgtgagtaattgggcaaaaccggaacggacgactacgtggtcgtcaataagtgcaactttaatcatgattttttaatgaataatggtaaatgcaataagttgcatgatgtgcaggaaaaggcaggttgtgcaaattaatcaactaaatctgcaagaaagctaacagatttagtgagttgatggatgactaagtcgatggagggaaaggattgtttgttaactatgcgtttatgagccatctttatgctctgagtactggcgtggcgaaagccagaaaaatggggattagcaaaaatcgccgtaaaccctccattagggctaggatttacggggcaattgttaaaaaaagccttttttatctatcagtgtggttttaaaagctggaaaagaggccaggctaaccacgaaaaaacaggtaaaaacgttaatcatcaaaagtaaaaagaattgattaaggatttttaaaagcgggtaaaaagtcctatgtcatgctgacattggaagagaaaacatcagaaaaaacaggttttaaattgattaaataaggtggaaaaaatgacagcattaacagcattaacagcattaacagcattaacagcattaacagcattaacagcattaacagtattaacagtattaacagtattaaaccaattttcttaaataaaagattttgcctgactgcaacaagtttacgaaaaatcagagacaaaaccgagcggcctttagattaaccccagaaaagcaagaatgtttagtaatattaaaaatgattaaagaaatttgtgttaatcttaatttcgttagcagttctgccaccctcactggttttaaacctaaaaaatcaaatacagaaaaagagaaacgagaaacgagaaaacctaaatatcagtttaatgaaaacaaggaggttaaatacgattcagaaaatgtaaaagctattaaacttaccacaattaagcaataaaaaccgttcgtcataacaggtttccaattaaaaataagcaccccatcagaatgaaaactacagtacaatcttatcatatttttaacattacttttttaacttacatttcccttttaccggtgattaatcaactaagggttaaaaaataggtagaccattgatgccaattttttaaaaaacataaagtgactaaaaacaacctattctctgctatgtttaatccatttatcggtaaatcggtaatactatcctccacttattttacatttacctaaccagtcatgactatttaaaaagacaaacagagaaattaatcactttattaaacagactgatttaaccaagaaaatcaaaattttcagtagcgtaattaatgacatttagtcgaaattcactaaccattaaccgagagttgaaaagtaataatcacgtaaaataacattaatagaatagattgacattaaagtattttttcaccatcgttttacgaaaaaatcaataaaaatgcgattaaagaagagataaaacgattaatttagctggatttaagcgctgaaaaggcgttatcctaaaaaacattaatggtatctctatactagaaaactatttattagtgatttaataaagaaaaaacaaaaggtgataatttataaaagctcgcagaattgccagtaaaacaatattggtaaaaaaatattggtaaaacaacatcggtaaaacagtgccagtcaaaataaatcggatatgattaacgttcgtttaaacgtaaaaccacgatatacccgtcatctttcaagttgcctctttgttggctgcactcgttcaccccggtcacatcgttatctatgctcccagggattctctcccttgccgtcgcgatgcatcttgaaatccatagggtatatatcataatgtttaaatttagcaaaaagctaatatccaaaagataaaaaaagattaaaaccagatatcgattaaaatcataggttaaaaaaataacttttaatcacagtttaaaaccggctccggttttatgggtattccaattaaaggctttagcatttgatagttatgaccgtacctttaatcgacaaacgccagtcgggcaaccacaattaacaaaatgtccctccagcgcgacaggtgttccttgtatattgaacaagttagaaccttccacaatcgcgccggtttgtttacaggcgggacaaaacaccgggtcacctttacaggcaaccgatagttgttggtttaccaaatcggaaccctttaaaacctcacctccggttgttgtggtatcacctttaaggataattttttttccttccactacactgcgcattatttactccgttgtattttccgtttctcgtattaaatgccagacggttgtccccggttctgcaccttcagcatcaaaagccatcgcaccctgagcaaagaagtactgtttgtcaggcaggctgtcggtttgccagatcccgctgaccagtgccggatggtcacctctcaaaggggtcacttgtagcggtccccggtcataacgggcataccaggccagggtggaagttgaattaaaatgaccagcaccgtaaaaatgcagggaatcaccttctctcggaacaaaacgtatcgggcgtatcaactggttaatggcaaaataactctccgggacactacccggtagcggcgttaagtcagggtattgaccagcccggatcatcagaccattggagtaagggctgattaccacatctgggtagcttgccagcgtgcggcgtatccaatattctccacccagtcggtttacaaatcgtttggacagcagggtgatccagttaatgcttcgtatggagtgggcataatcatccagtgtggtgtgaacagtggaattgacttgcagggaagggtagcgcagggccagttggtactctaggggaaaataatcatgataatctctgggcaagaccagacagtaaccacagtctccccaatcaggttcgagctgttcacacagaaagtccagccatgccatgaatcgggtcatgccctcttgttcctttagataatcccagggcaataccagactgaggtaagagctactgtcgtcaccatcatcttcatcggaatctaggtaatgcatcagatagtgaggcgcttcatagatatttttagcatcactaatatcccaagtagaaggctgattttttctctgatttaggatgccctcttccactttggcaatattttccggtgaatattttttgagcccttccagctcatgacggtgaaaacgcaggtgagtaccaaactcctcccgaaaacgctggtagcaggccagaatgcgttgttttttctcctgagtgtaaccctgtttaaaaaacagagtaatagagagacccagacgagaaacagtcagtccatcgccattgaggaaggtaaacgcggtcagttgtgatctcaactgggcaaagtaatctacagtttccatattttctccgtgagtgatgagtcggtggataatctgttattcccacatacttgccgcttcccgaatcagatgccagatagttgtacccgtctctgcaccttcaacatcaaaagacatcgcaccctgagcaaagaagtactgctggccaggcaggctgtcggttcgccagatcccgctgaccagtgccggatggtcacctttcaaaggggtcacttgtagcggtccacggtcataacgggcataccaggccagtgtggaaatatcatcaaaatgaccttcaccataaaagtgcagggaatggccttcacggggaatgactcgtattgggcgtatcagttggttaatagcaaaataactctccgggacactgcccggcagtggtgttaagtccgggtattgaccggcccggatcatcagaccattggaataaggggtaatctccacatcccggtaggggcgcagcgtgcggcgtatccaatattctccacccaatcggtttacaaatcgtttggacagcagggtgatccaattaatgccacgaatggagtgttcatactgtaataccgcagtatgaaccgcagaattgacttgcagggaggggtaacgttgcgctagctggtactctaagggaaagtagtcatggtagtctctggggatgaccaggctgtagccacagtccccactgtccggttcgagttgttcacacagaaactccagccaggccataaaacgagccatgccctcttgtccttttaggtaatcccaaggcagtgtcaggcttaggtaagagctatcatcgtcaccatcaatttctcgggaatccagataacgcatcagataacgaggcgcttcatagagatttttggcgtcactgacgacccaactagaaagctggttttttttctgattaagaataccttcttccactttggcaatattttccggtgaatattttttgagcccttccagctcatgacggtgaaaacgcaggtgagtaccaaactcctcccgaaaacgctggtagcaggccagaatgcgttgctttttctctagggtgtaaccctgtttaaaaaacagagtaatagagagacccagacgagaaacagtcagtccatcgccattgaggaaggtaaacgcggttagttgtgatttcaactgggcaaagtaatctacagtttccatattttctctccgttaattatgaagcggtggcgaatgtcacactcgccaatattgccagaacggtagccaacgcagcggcgcttaccgcagcagccgcggctaaaatttccaccagtgcaatcagcgcagcagcaacggcaagggtgaccaggataacaacggcaacaccggcaataatcaccaccatttccagcatgccttcccccacctcttttaatatctgcatccagctaatgttttttaactcttccagggtgatatctgaaccctgttgcaccgtctgccaccgggcttttatctcactctccgtccaggtcacgatttttcccgtttgttcactgacccaggaaaacgcgtaactgatctgatggcttatcggatcaataatctcttcacacacccacttcccagcttgatttaaccaggtaccaaactgggcaaggagctcccgggtactgtcgcggacataattcaacccattttcagtcagaccagccacctcctgcccaagaacaacccagtcttcatagctgggtaaaaacgaccaacgggaagtactgagaagcggtggattttttgtcaggggttgcggaatggtccccggcacaccctctgcgggcggtacgggtaaagcttcatcatcaggcggcgaaccgggcggcagcggggccagtgggatcggatttttatagtgttgggagccgggctgataaagttttcgccacgcttcatcatactgtttttgctcttctgtacggttatcgtcgatgcgcattaccccaaagcgtttttctgttgcaatctggatataatctcgttcctgattgtcagagagcacatcccccggaaatttcacctcaatcaacattttcagattatcggggtgcacagaaccatcgaagtaggtggcatttctgcccggccagcggagagcctcctctttaaccaaaataatatcgggccgacggataccaacaaccccaaatttctccgcgtcgtcggcagaaggccgggcaaacggattactggattgcggtaagttatcgccataacgctgtttagaggccagactggtcgccagcatgggcaaaggaacatccttcttcccccggatagcaaacaccacttctgctttataggaccataaaaagtcatgtttgagttcctcaaccttaatcaacccactcataatgatttgattaagaaagcgaatagcccccagtttggtcataatcattgccggcaggcgcagggcatattcagctttttccgccagataacagggatcttcatcggcgggaaagacgccgatttccatcgtacaggtgattgatgtgacagccgggcacatcttgtcgttgttggatattgccatacttatatctccataaattccatcgcatactctaccggcgtgttactgctggcacggtataaggtttgcttcggcttgggggttgcttccggtgaacgcagttgcagattttcttctgcccagttgttcattcaggggaatgtcatcacgtgagctcaccacctttaacgtcaggcgataaagctgtgacagctcttcctgcaaggtaaattgcgctacctgaaaggtggtttggggcagtgcgccaattcggcaggtgaaaactaatccatccatatttgaaaccctgcataattgaaccattatcctgagacggggataacgcaagaagccattaaacgagccatgacatgcggctcttttaaatagcgccggtctgttccgcggtaaaaaaatgacagcgcaaaatagccatcacttaatacgtggcgttagagagaacaatagaccgcgtccaactgagtaggatggagtggagacaaataacagagaatttcactctctaaatattatgaccacaagatcatgatatttatcatatggacataaaaaaatgtgataagtatcacatgaaatggttcattaatcgctattaattccgatttttcatattgaattctttaattaatacatctctgcgggtttattttcaatgctggccttttgcgacatcctctttacggcggggagcagtcacaatatctggcacaatgacaacgtgcccgtttggcgtgttgaaataacatcaagtagatttaatttggttaataataaaagggttaacctgcaataaaataagtagctcccttgtcgtcgcgatccatcttgaaatccataaggtataaaatctttaatatctcttttcacataaaattttgcgccctgaagttccgttttctgggcgggtgattttattcgttcagcatttttatattaataatccttttaatccttgtggtatctgctgacgcatcatctgttagtctcagatttgaaaagtgggaatcaaattctttatcatcgcgattcaaaaccttctccactaacatttttgactcaggggggaatagcatctctgcttctcctttaaaatgagctgcgtcccctaaaatacgacctttatggcctgactcaagatttatgaccagaatagtatcattgacccaggctttatctggcgaggtactaagaaaccctttttccgcaatgatgtttccctctgtagtatattgatccagtaaattcttaagttctgatttatcgaattttaacccgcgataaacttttttatgatccgtgatagcaagctcatttaatccctctgtgacgtcttgaatatatgcacgcattcctgcatcaaattcttgaggcgttggttcattactgtgtaagtaatttctcgacaataatgtttcaatagcttgatgcttaacgtactctcctccacgcaggtaggtatttataagattatatccctgtgcggaataatacctgagtgcctggagctgcttagagtccgtattgactacccatttctttactttttgcgttttatctgccattggcggtggtgggggcggtggcatgttattaacaggctttcgtccatcactgtctttgatgtgctgttggttgttttgattgtgctttatcagttcggctgtcgcggaggagaccaaggtggtggtgcagccagtctgggctttggtgatctgagcggcgatagattgtggtaaggccggcatgggctgttttaatattacttggggaccggttgccatcacctttgattgtagagtgcgccccacggtgccttgttctgccagagcctgtttaagttcagcaaggcgggtactacgggccatcacctctttggggtggtggttctcccagtgctgaatagcatcctgcacccgccgggcttgcatactgctgggagcattctgcaattggcgcagctcggcgcacaaatgtttgagcgacgaactctgaaagtgaagagggccacgccgaacagactgttcgaacagacgattgccctgttcgagtagaggagaagttgtggcatgttgcggaacttgtatttggctaagcggcatatggccgctaataggtgagattggcattatcttttccaaaataggttgagttaattagggatatcttagtatttttcttgccctgtttatgtaaagaatcgactaggcttttgtttactttaggttttaggttttattagaccactacaatgaaaacgcagatgagtaccaaattcttcacgaaaacagcggtagcaggccagaatgcgttgctttttctcctgggtgtagccctgtttaaaaaacagggtaatcgaaagacccagacgggaaacagtcagcccatcgccattgaggaaggtaaacgcagccagttgtgatttcaactgggcaaagtaatctacagtttccatcattttctccgtgagtgatgagtcggtggataatctgttattcccacatatttgccgcttcccgtatcagatgccagatagttgtacccgtctctgcaccttcaacatcaaaagccatcgcaccctgagcaaagaagtactgcctgccaggcaggctgtcggtttgccagatcccgctgaccagtgccggatggtcacctttcaaaggggtcacttgcagcggacttcggtcataacgggcataccaggccagggtagaagttgaattaaaatgaccttcaccatagaagtgcaatgaatggccttcacgaggtatcacccgtatcggacgtatcaactggttaatagcaaaataactctccgggacactgcccgggagtggggttaagtccgggtattcaccggcccggataatcaggccatcacggtaagaagtaatcaccacatcccggtaggggcgcagcacctgacgtatccagaattctccacccagtcggtttacaaatcgtttggacagcagggtgatccaattaatgccacggatggaatgtccatactgtaatttggctgtatgaaccgcagaattaacctgcaatgcggggtaacgctgcgctagctggtactctaagggaaagtaatcataataatctttgggcaggaccagacagtagccacagtctccactgtccggttcgagttgttcacacagaaagtccagccaggccataaaccgggtcatgccctcttgttctttcagataatcccagggcagcactagactcaggtaggagctaccatcatcaccatcaatttctcgggaatctaggtaacgcatcagatacttaggtgcctcatcttcatttttagcatcactaacgacccaaccacagagctggttttttttcctggcgagaataccttcctccatcttaataatattttccggtgaatatttgcttaatccctttaatgaatgactgtgaaaacgcagatgagtaccgaactcctcccgaaagcgccggtagcaggccagaatgcgttgttttttctcctgagtgtagccctgtttaaaaaacagagtgatagaaatcccaagacgagaaatggttagcccatcaccattgaggaaggtaaacgcggccagttgtgatctcaactgggcaaagtaatctacagtttccatcatattttccatttagttatgaagcggtggcgaatgtcacactcgccaatattgtcagaacggcagctaacgcagcggcgcttaccgcagcagccgcggctaaaatttccaccagtgcaatcagcgcagcagcgacggcaagagtgaccaggataacaacggcaacaccggcaataatcaccaccatttccagcatgccttcccccacctctttcaatatctgcatccagctaatgtttttaagctcttccagggtgatgtctgaaccctgttgcacagtctgccaccgggcttttatctcactctccgtccaggtcacgattttccccgtttgttcattaacccaggaaaaagcgtagctgatctgatggcttatcgggtcaataatctcttcacacacccacttgccggtttgattgagccatgaaccaaactgggcaagaagctctcgggtactgtcgaggacataattcagcccattttcggccagaccagccacctcctgcccgaggacaacccagtcttcatagctgggtaaaaacgaccagcgggaagtgctgagaagcggtggattttttgtcagcggctgcggaatagtccccggcacaccctctgcgggaggagcgggtaaagcttcatcatcaggcggcgaaccgggtggcagcggggctagaggtatggggtttttatagtgttgggagtcgggttgataatgttttcgccacgcttcgtcatactgtttttgctcttctgtgcgattatcgctgatacgcattacaccaaagcgatcttcggtcgcaatctgtatgtaatctatttcttgatcttcagcaagtttatcgcccggaaatttcacctcaatcaacatcttcaaattatcagggtgcacagaaccatcgaagtaggtggcatttctgcccggccagcggagagcttcctctttaaccagaataatatcgggccggcggatactaacaacaccaaatttctccgcgtcttcggcagaaggccgggcaaacggattactggattgcggtaaattatcaccataacgttgcttagagtcttgactggttgccagcatgggtaaggggacatcttgctctcctcggatagcaaacactacttctgctttatagggccacagaaagtcatgcttaagctcttcaaccttaatcaacccactcataatgacttgattgagaaagcgaatagcccccagtttggtgataatcattgccggcaggcgcagggcatactcggctttttccgccagataacagggatcttcatcggcgggaaagacccctatttccatcgtacagttaattgaggtcacggccggacacattttaccactgttagatattgccatacttatttctccgtaaattccatcacatactctatctgcgtgttaccgctgactcggtataaggtttgcttaggtttcggtgaggcttccggtgaactcagttgcagattttcttccgcctcactctgcaccgtcaccgttctgcccagcgcgtcagttttacccgggataacctgaccctcgccggtggtgatggtgtaggggacattcaccagcggcttatcgctgtgctcactcagcagggtatagcgggcggagtagtcaaacagcgcaccggcggatttcttgccgatgatatggtcggtcatggtgatgctgaccccttcgatgcggatattgcccatcgggtcaataactatctgtccgcctgcattcccaatggtgatttgcccgctttcagagtgcaccgtgatatgtttacccacagtaatttgctggttatcggcgacgtttaattgatggcttttacccacggaaagggcttgctgacctttaatagtcaccgtttgattctgaccaacttcaagcgtctggccgccctgcacggcttcatcatcatcgtttttaattatcgcggtacggttatgcgccacttctgtttgctggtcatggcctatctgcgtggttttatcccggagaatctgggtattcatatcccgctgagcatgaataaacacttcctcgcttcctctggcatcctcaaagcgcagttcattaaatccctgccctccgagagtccgggttttaaaggtggtacgggttttctccagcggtaaattaagaggcgggcggttgaggccgttataggtacaccccgttacaatcggacggtcgatatcgccgttgagatagctgacgatcacctcctgcccgacgcgcggtatcgccataaaaccgaaaccgttaccgttccagccctgtgccacccgcacccaacaagacgcgtggtcgtccgccttatcgtaacggttccagtggaaatggatccgtatcgcgccgtgttcgttcacataaatctcttcgcttcccaccccgaccaccgtggcgacttcatcaccgtccgccaggggtttgtagcggtaagggggccgccagtcctggtttccgggaataaaggcgacctcgttggtcagtgttgtgccttcgcccccgccgtttgacgcgacaggttgccacccatgatgcgtgacagagatcacctgccagcggtcgttcatggcctctatgggatgggattgcagggtaaaaattttgcccggccgcagccggatacagttggttttggcggtaccgactttactgtagtttcgtaactgttccagccgcaattgggtaaaaggttttccttcctcgtcccactggaaacgcccgtaactttcaaacaccgaatggtgcccgctatcgtcggattgcttctgatgctcaagcgaatatttggggttaagaaagttatgatctttctggaccgtgccattcgaacacaggtattcgccataactccactggtacgccgtggtatcggtctcgtccgtttcaggatgcgtattgtaagtcagagcgatatccgcctgcatgcccaggtggcaatcacagaacaacgtctgttcttcctcaaaccagaagataatgccctcttccgccgccagccggcaccagaaatcataagcggattcgcgtttttgcgtggtgtattcccgttcggcatggcgtttatagagcgtatcgcgggtaaataaaatacgatgctctttaagcaagatcgttaagatttcgggtacagacttcagatggaaaatacggctatcctgattgagcgtcatcagccacattgtgggacggacagtgaaaatataaaaagtgctacgaccatcggtattaccctgttcagcgccggttatcatgccattaatggtccgttcggtgatgccattacgggtaatgaccaatgatgcactgtcccccagttgttcattcaggggaatatcatcacgtgagctcaccacctttaacgtcaggcgataaagctgtgacagctcttcctgtaaagtaaattgcgcgacctgaaaggtggtttggggcagtgcgccaattcggcaggtgaaaactaatccatccatatttgaaaccctacataattgaaccattatcctgagacggggataacgtaagaagccattaaacgagccattacaagcggctcttttaaatagcgccggtctgttccgcggtaaaaaaatgacagcgtaaaatagccatcatttaatacgtggcgttagagagaacaatagaccgcgtccaactgagtaggatggagtggagacaaataacagagaatttcactctctaaatattatgaccacaagatcacgatatttatcatatggacatgaaaaaatgtgataaatatcacgcaaaatggctaattaatcgttctcaattccgatttttcatattgaattctttaattaataagaggcaacttgaaagataacgggtatatacggttgaacagagcatggagcattattgggaactcatcttgttcttgcggttacaaaaggaggtattgattaccgcatctcctgaggttcgtgattacattaatggattgactgcctattacagcggtagtttgatttgggtgcgtgataataagcgttattgttccgtcagtggtctttcctgcgacaatctatttgaagggggattgttcaccgatatcctgctgctggaaagttttgagtcgtcacggcttccctcttttgagtggtggtgggaatacgatccagcccgtacaactcatatgaattaacctacactactgggacaacacctgtcagccaagttgggtacggtggattcgaaccgcatttgcatggtgcaacccaactgccgataaggcgctatttcgacgtcgatataaaaaacttcgccctagggataaatcacggcttgccagtgattgttaacatgatcacactttctattgcgtgcgaagcccttggtctgtaagggataacgagcggagaacatcatagtgaaagcatatcaacagacagtatcggaatggttgcaccttgtgggtgagcgccaaggcgtggctttgagcattggcggcgatgatcactgtacagtgcctttcggccaaggtggagagtgcatcgttgaagtaccggataacgacgacgttcaggcattttatctctatattcctttgttgcgattacctgtagatgaaccgggccagttgatgctgactcgggctgcccttgagctgaatatgttcggtctcaccaccggcggcagtcagatcagtctggacagtcgtaccaattatctggtgttgagcttctctgcgttgatcgagatgttcgacgaaactgcatttatgcaaactctgggtgagtttctcgatcttggtgtcagcttgcaggcccagtttcaggcgatcaacacccagcagaacggagcgtctgcgccgcatccattacttggctcagccatcgcatgctgagtagcggttatctgaatagcaaaggagaataagatgtctattcaaagtcttgggcaaactttcaaaacgacggcattgtcgcccctttcgaacggagaggtacagacaccatctcgcaataataatgttcatcatcatcttgcttcccattacaccagtacgggtcttggtactcaggtgtcgccgggcaaggtgctgaccactacactgaaatatctgacattgagtgctccggctcgcaagattggcactgccatacagggaggacatgattcccacgcacagagtgccaaaggtaaggcgcgctactggactggggccattatcaagggattggctaatatcacgggcggcaccagtagtgtaacgagcggtgcaatttcggtcggtgttgtaggcgttaaaaacctggcggaatccacagggcgtttgctggcatcttctgccttggggctggctggagcgggcgcgaagggagtctcgcacttacctcttggcgcgtccgatcgtttgcaggctggaacgcgtgccgagcaattgctgaattctgccaaggtgatcgccaaacccgcgtttgtggctaaagcagaacaagagccgttgaatgctgtgggagctaaagcagtaatggatgcggcccaattggcgagaatcagttgctccagtagctatcgggatatgccagcaggttacagtcatgccactttagctgatatcccgtcctcgatattggctcgccgggaggatggcactggcggaaccggcagtgagttaaccctgcatgttcgccccagcaaaggggagaatgatcctttaatccttgagggagatagctggtctgcgctcaaggttgctgtctataagagtgacgacactatggtgctctcctttgtgggcactcagccgaccaagcgccctggcacggtgaagagtgatgtcggcgctgctttggggatcaaggacagcgcgtttcaggatgctgaccgcttggtcaaagcctttactaaacaatatggcggtaaggttgaggttctgggtcactccttgggcggcgggctagcacaatatgcgggcatcaagcatgggatcaaggtcactgcatttaacagcatgggattgcatgtagggttgcgagatcggttggccgacaagttggatagtgccaatgtcacccacatcaataccagtagcgatccgctgagtcagaaggccgaacatggtatttggggcttggatgcctcttctcaggtaggcaagcgttatgtgattgagcattcaggcggtcaccgtatggagtcagtgaccgcaggtttggaagctttactggcttaatgacttgatatgttaggacagcgcctcctgcgggaggcgctgttactgctaatagacacagtatttaacgcaattgcaccttatttcagcgcgttgaggatttgccaggccgctttaatacgcgcctcgttggggtaatttttgttggccagcagcacaatgcccatttgctcttgcggcacaaacgcaacatacgtgccgaagccattggtggaaccggttttattgataaaaagcgcatccgttggcggctctggtagcgctagttccgtggttttgttggcctgataagcgatctgcgccgagttgccgctcagtacctgctcaagggtaacaggccagtgataaagttcccagcccagcccttgcgtcatttcccccacccggtaataaccggtatgagttgcccgaatggcctgtgccagcttgctgtcacctacgcgggaaggatcgatatttgcatctacgaagctaattagctcctgtgcactggttttcagaccataggcttcctcatccagcacaccggggttgatgcgaatcggtttattctcttttgaataacccaacgcataatttttcatctcctgtgcgggtacgttaaaccaggtatggtgcagaccaagcggtgaaaggatctggttttccatcagttttgagtaaggtttttcaaggcgttgggcaacgatataacccgcaaggccaatactgggattagagtactggcggtaggttccgggcgtgtacgttggctgccagtgctggaaccagtccaccattttgttattgctgtcgatctcatcagggaactgtaatggcaggccacccgcggtataggtggcaatattcagcaagtttatgttgtcaaaggcgctacctgcaagcggttgaaaatgctgactggccttatcggagaaggaaatggctcccgtcacctgcgcccaagaaatcaggctgccggtaaaggttttgctgaccgagcctaattcaaagattgtctctttggtgaccggcgtgttgctctcttttgatgcgtcaccgtattgatagaaaaaatgttgaccgtggaaagtcactgcaatcgccattcctggaatgtcatattcctgcatcagggagtgtatggtcttatcaacagtatttgtcagacgggtctgatcggcggtattcgaggcttgagcgccgagagaagcggtaagcagcaatccgccagtcagcaccgaaaatcgttttgtcatgtggtgtgtccttaattacagtgagagctttcaggcttggattttatcaggatttgtacacccaatcacaaaatttgtgatctctatcacctgacaaaataaaactttgcggttgcggattgaaaaccaagcgctttcgtttcttgatatcaattgttacccaaaaggtggatgaaaactgatttttgggtaaatagccagaaatcagaaaatttaatattttctttcgctttgtttctaatcgaaaccttttatgccgatttttgtctatataatagactgtaatagcgatcacaatttcgtttggttgcttttgctgtaattaaatcgaaagagagggaaagcaattcatcacaggcgacataaatttgttgctgaaaatctgaggagtataacggaatggctgtggataccgtaaaaagacgtgaacagattatcgacttgctgtgccatgagggcagcgtgcgtgttgaacatttgagcacccgttttggggtttccagcgtcactatccgtaatgacctgcgttatctggaacaaaaaggttgtgcattgcgttcctatggcggtgccatgttgaatcagcaattcgcctttgatcgtcccttgcaagataaaggccggatcaatcgtgatgtgaaatcgcgcattgcggctagggcggcacagtttgttcaggatggtgatgctctgatccttgattccggctcgacgactacgcaaatcgcgccatttcttaaagagcggcgtgatctggtcgtcatgactaacgcgttgaatatcgcctatgaactggcggggtttgaccggatggaggtgatggtgcttggcgggagtgtacgccagaactcctactcgctttatggtccggcggcggaacagcaattgcgtcaatatcgctttgacaccctatttcttggcgtcgatggttttgatctggaagcagggataaccacgccacatcccggtgaagcccaccttaatcgcgtaatgtgtgaggtggcgcatgaaattatcgcggtggcggatgccagtaaatttgggcgcagaagcttttgcctgatccgtcaggccggacagattcatcggctgattactgacagtcggatccctgataactacaggcgggcattaattgaactcggcgtggatgtggttattgccgacgaatagttcttaccgagattcttgcccgcatgggaggcaccatgcagtcgctattacaacttatccgtcgtcataaatcaggtgaagccgtggggatctattcggtctgttccgctcatccttgggtattggaaagtgctttgcgcgtcgctaaagagcgtaagacttcggtactgattgaagcaacctctaatcaggtcaatcagtttggtggttataccgggatgcaaccggctcaattccgggatgcagtttggcaacaggccgatcgcattggtttaccgcgtgatcgtgtctggttagggggcgatcatcttggacccaatgcttggcaggatcttcccgctgaacaggcaatgaaactggctgaaacgttgatacacgattatgtggcggcagggtttcgtaagatacatctcgattgttcaatgtcctgtttggatgatccaacgccgcttggcgacaaggaggttgcggtacgtgcggctcgtttgtgtcaggtagcagaacgttgttggcagcaggtggggggagaaccaccggtttatgtgataggtaccgaagtgccggtaccgggtggagcgaaagaagcattagcaggaatgcaagtcacgacgcctcaggctgcggcgacaacgttgagtgtacatcaacaagcctggcagttggctggattggaaccggtatggccacgggtgattgcgctggtggtgcaacccggggtggagttcgatcaccattgtatcgaacattatcaacctgaacgtgcagcggcactgagtcaatatattgaatctcaaccctatttagtctatgaagcccattccaccgattatcaaacggcgcaagcttaccgtgaattggtacgtgatcactttgccattctgaaagtcggtccggctttgacttttgctttacgtgaggcgctgttcgcactcgataaaatcgatggtgaatggaatggggaacagggcgcggctcatctgcgtgccacgctggaacaggtcatgcttgagcagccggagcactggaatcgctattaccacggtacaccacatcaacagtttattgatcgtcaatacagtttgagtgatcgcattcgttactactggccgcatccgcaggtacaacaggcagtgaataccttgatggataacctgcgtggtcgcccggtttccctttcactgctgagtcagtacctgccggagcaggcgcaggcggttaatgccggaaggttggataatgacccacactcatgggtgttggataagattcgttctgtgctcttgagctatgcgctggcttgtgagcccgaggtacaaggagttttagtatgaatgaactgttttcctataccgaagcttggttgcgtgagcatcatgctctgcatactgccagagagattcatcaacagcctgagctttggcgtcagttatatcaaaatctgcaacgtgaggaagcgttatggcgaccctttttgcagcctttgttatccgatccagagctacagctacagatagtgctgtgtggtgcaggttcctccgcgtttatcgggcgcacgctggcaccttggttgcgtgagcagtgtggactgaatgtggtcgcgtacagcaccacagacattgtgccttctcctttgcaatatctcgatccaacacgttcaaccttgctgatttcttatgggcgatcgggcaatagcccggagagcgtggcggcggtaaaactggcggatcagctcctgccacgctgttatcacctgatgctgacttgtaatcccggcggtgcgttagcacgttatgccgaagggcgctctcacgtctgttcgttgaatatgccccagggttctcatgaccaaagttttgctatgacgtccagcttcagttgtatgacgttagcaacagtgctgctgctagggccgttgacgttggaacagtgtgatgagccgttgatggcgatgatcgcgttgtgtgagcgggaaagggaacagtggcagacacagattaagcggctggcatgcagcggttttaaccgcatgatgtgtctgggttccagttgctttactggaatagcggaggagggagcgctcaagatgctggagttgactgccgggcatgtcaccacccgttacgattcatcaatgggggtgcgtcatgggccgaagtttatgatcgaacgggatacgctggtggtcatgatgctctccgctgatcagtatcgtcgtcgttatgatctcgatctgtggcatgaactgaatcatgacggattggcgtgtcaaattgttgcactgagtggcactcaggggaaagggttcacggtgattaacagtgaacaagatgatatctggctgttgttcccctatttgatatttttgcagatgttagcgtttgaaacctcgctggcactgggcataacgccagacaatccatgtccgacaggggaagtcaaccgcgtggtgaagggggtggaaatttatccttatcatccaccgtattcaccaagaataaaatgtagcaggagtgattatgtcgataccgaatattttaatgacccgaattgataaccggttggtgcatggtcaagtcggtgtgacttggaccaattcactgggggccaatttggtattggtggctaacgatcacgttgccggtgatttgatgcagcaaaatctgatggatatggtggtttctgatggggttcagacgcgttatttcaccctgcaaaaaaccattgatgtgattcataaagcggctgagcgccagaagatttttatcgtttgtaaaacgccgcaggatgtactgacgttagtaaaaggcggtgtaccgatccgttttgttaatgtgggtaatatgcattttgctgagggaaagcgtcaaatccataagacggtttcggttgatgacagcgacgtggtggtgtttcgtgagctggagcaactgggcgttacttgcgaaattcggcgtgtgccggatgaagcgggagaacctatcgccaaattgctggtttgaggggtgagttatgctgattgatgcgatattgattggattactggccggattggccggggtggatctgttcgatgggttgactcattttcatcgtccagtggtgattgggccgttggttgggctgattttaggggatgtacagacgggtttgctggtcggggggacactggagctggtctggatgggaatggtgccactggcaggggctcagccgccaaatgtggtgattggtggtgtgattggtacggcatttgccattttgactcatgctgatcctaaagtcgcgattggtatcgcggtgccattttccattgcggtgcaaggctgcatcaccctgctgtttaccctgttctcacccatgatgcataaatgcgatcagatggtgaaagcgttgaactggcgtggcgtggagcgtgtgaattatctgggtatcaccattctgttttgcttctactttatcgtggcatttctgccggtctatttcggtgctgacgctgccagtgtcatggtacaaaaggcaccgcaatggttgttggatggtctggcggttgcgggtggcatgatgcctgctatcggtttttccatgctgatgaaaatcatgatgaaaaagagttatatcgcttatttcattctgggtttcatttcagtcacattcctcaatatgccgattattgctgtagcacttggcgcttttgcgattgcactgatcgatttctttaaccgttcccgtatggaagaggccgctgaacgcagcgtatctactactcaatctcacactcaatctcaggagatggaagatggcatttaacgacaccgatgcggctatggcagctaaagctgagaacaggatggcgcaggcgctggcaaccagtcaggttgagcaggatgactatcaggacacgataccgagtgaggatctgaccaaaggcgatttgaatcgtatggcgtggcgctctttgttgctacaggcgtcgtttaactatgagcgtatgcaggcaggaggctggttgtacaccttgatccccggtctgcgtaagatccacaagcatccgcaagatctggcgaattcgatgaagatgcatatggagtttatcaatgtacatccgtttgatgtcaccttcctgtctgggttggtactggcaatggaacggaataaggagaaaatttccactattcgcgccgtaaaagtggcgctgatggggccgttaggggggattggtgatgcattgttctggttgactctgctacccatctgcgcgggtatcggggcttctctggcgctacagggtagcttgtttggtcccatcatattcttgttgttgttcaacattgtgcatttcggcttgcgttttggtttagcgcattatggttatcgtgcaggaaccagtgcgttggcattgttgaaaaagcataccaaaaagatttcccatgctgcttcgatagtaggaatgacggtaatcggggcgttagtggcttcctatgttcatctctcgacgccggtggtgataaacgccggtaaggccagtgtggcgttgcagaaggatgtgctggacaaactgatgcctaatttgttgccgttgtgtttcactttgctggtgttttggttgatgaaaaaaggattttccccggtcaagttaattggtttgacggttgtgatcggtattgtagggaagtttgtgggttttctttaataaacggcactgaggagagggaatgttaggtattgtaatcaccggtcatgggcatttcgccagtggattgttacaggcagtggaacaagtcgtcggacgacaaccgcagtgctgtgctgtcgattttcctgaggggatcagtacgcaacaattattggtgtcgttggaggcggcctgcaccgcctgtgatagtggtgagggtatcattattctcagtgatttactgggtggatcaccgtttcggcaggcggcgcaactggcaatcgctaatccatgttatgaagttattgccggtaccaatatgcaattagcggtagagatgatgctggaccgtgaaggtatgacgctggaaacatttcgtgatacggcgctggagtgtgggcggcggggattaaccagcctgtggcacgaacagcagaaacgagggtatgacagcccgaatctggatggcatttgaggagcttatatgtacttgatttccagtcgtcaaatgttgaaaaaggccctgcgtgaaggctatgcggttcctgcttttaacgtccataatctggaaactgtccaggtggtggcggaaaccgctgcacgcttggcatcaccggttattctggcaggtacgccgagtactttcagttatgcggggactgactacctagtatcaatctgtcaggatgctgctcgtcgccacaatctgccgctggcgttgcatctcgatcaccatgaggaattggaagatatcagtcataaagtgaccgcgggtgtgcgctcggtaatgattgatggctcgcatttaccctttgaagagaatattcgtaaggtagctgaggtggtacgattttgccatcgttacgatgttagcgttgaggcggaattggggcggctaggcgggcaggaagatgatttgcaggtttccagtgccgatagtttttttaccgatccgctggcagcaaaagcctttgttgcccgtaccggtattgattctctggcggtagcgattggttctgcgcatggtttgtatcatggtgaaccgcatttggattttgatcgactagcggcaatctgtgaacaggtggatattccgttggtgctacatggtgcatcgggtattcctgaagtgatgatacagcaggcgattggtcttggtgtatgcaaagtcaatgtggcgaccgatctgaaaattgcttttgctgatgcggtaaagcgttatttcattcagcacccagatgcgaatgatccacgtaaatatatcgcgccgggaaaacaggctatgcaggcagtagtagaagaaaagatccggatttgtggcagtgtaggcaagctgtattcgtgaaggttctgttttttcatcctgactatgaaggaaactgctgtgaaaataagaacgttaaataaaattacgttgagtttattagcgagttccatgttgtataacaccccagtctgggcagatagctggctgttggacggtaacaattaccatgtaactgttagcgacgaacacagtaaagtgacacaattaaaatttgaaaatcccaaaaaccacgatcaaatcattatcgacaatctgtttgaaatcacgttgaaatcaggggaaaagctcacggctaaagattttcagattactgatattagcaaaaagcacaatcgtattgttgtctccctgaaacatggcgacattcaggtaagaaatatcattactgtggaggataaagataagtacggctcgtttgaaatcactattacaccgcaggaaaatgcgttggagctcagctctgtctcgttgatgccatttcgcactaaaaccccttttgttcacggttctatcgtcagttcaccgattgtcagcgatagcttctttattgttcccggtaatccattgattaccactgaggcgtataaagggagcgcttcgcaaaaaattgcgctctctatcccgttagagccggggaagacgttaagttataagacgtatattggtgtttatcaggcagggcaattgcggcgcaacgtcaatgagtttttgaacaatgctcgtccgcgtgaatatagtccttacctacattacaactcttggtacgatattggttacttcacgccttataccgaacaagaggcgttgacccgtatcaatcagtttgggcaggagttggtgactaagcgcggtgtgaagttgagtggttatctgtttgatgatggttgggataatctcaaaggagattggggttttagtcaggcatttccccatgagttcaaaaatcttaaacaggcagcagatcaatatcgtgctcgtttaggtatttggctttctccttggggcggttatggtaaaccgggtgagcaacgtgtttctcatgcggaggagtttggttatgaagtgatagatggcagatttgcgctctctggccctaattactacgccaatttccataagcgggtactcaacttgattcaacaacaaaatgtatccatgtttaagctggatggcaccggcaatgctgatcgtgtgattaaagggagttcattcaccagtgattttgatgccgctatccatctgattgacgatatgcgcagtacggaaagtgatctgtttatcaacttgaccaccggcaccaaagccacgccttcctggctgtttttcgccgattctatttggcgtggtggttatgatgtggagtttcacggcacaggttctaaagtgcagcagtggcttacctatcgtgatgcagaaacttatcgtaatgtcgtaagaaatgggccgctgttccctctgaattcgttgatgctgcatggcattgtttatgccaaacaggccaagcatctggataaacagtcacctaaagattttgccgatcaggtttggagctattttggcagcggcactcagttacaagagatgtatgttacgcctgacctgttgaccacagaggattgggatacactggcaaacgcggcgaaatggtcagagaaaaataaagatgtgctgtttgatacccattggattggtaaagatcctaccgatctagcggtgtatggttggggagcctggagtccgaaaaagtcgattattactttgcgcaatcctgctgatgaagtgaaacaatattatctggatttgcaaagtgatctcgaattgcctgatgatcaaccttcggtatatgacgttaatatcgattatggcgagaacagctcgctgccgaagcttatcaataaaacggtgttgattacccttcaaccgttagagacactgaccttttctttgaccccatcgaaataatcacagtgttattaaactgccctgaataaacgactttattcggggcagtgattatttttttaagaatccatttaaaggacaaaactaatgaaagcgttgatcgtgatcgatatgttaaacgattttgtcacaggagcactcgccaatgaggcggatgcgatgaagatcgtaccggtaattaaacggctaattgatcatgcccggcgtcaaccggattggctggtggtttatgctaatgacgctcatcgcgctgatgatcgggaaatgagtatttggggcagacatgcaatggctggaacgctaggtgctaatgtcattgaaacattggcacctattgggacagatcgtgaaattgtttcgcctaagcgattttatggggctttcgatggaaccgatctggaagaggttttgaaagtatatggtgtgacggaagtggtgttaaccggccaacatactcattgttgtgtcagacataccgcctatggcgcgtttatacgcggttatcaaatcaaggttccatcagatgctgtgtgtgttttccccggtgtcgatcagcaagatgctattaattaccttaaaaccatttacggtgctgaaattacaatgagtactgcattagtcatgtaaattgggataatctgttaattcagttagaaattgatctggcagatacctgtaaatatgggtatctgccagttaaataataagttagtgaaagttaaacagtgggtaaattacggccgtaataaatttcttgtatctcttttttcaaaagatgggtaatttcctgcttttcagcttcactgagttgctctggtgtggcattaaataagtaatcattcaggtcaaatcttttcaacatcatttttgtatgaaatagattttcctgataaatattaacatccatcatgtaatactgtgattgcacttcttcagtcatataattctgaatagaactgatctcatgatcaatatagtgtttcatgccattcacatctctggtgaaaccacggacacgataatccatcgtgacaatatctgattctaatttgtggatcagataattcagcgccttgagaggtgaaataacaccgcaggttgatacttcaatatcagctctgaaagtgcatataccgccgccgggatgactctctggataagtgtgaacacagatatggctcttatccaaatgggcaacgacagaatcaggtaacggacctgggttttcagtgttgtctacatccttcgggtccatcggttcttcgctgactagtatggtaacgcttgccccttgtggatcatagtcctgacgggcgatattcaaaatatttgcaccaatgatcgaacacgtttcgctgaggatttccgttaaacggttagcgttatattgttcgtcaatgtaagcgatataactatcccgatcagcttggcttttggcataacagatatcgtaaatacaaaaactcaggctttttgtcaggttattaaaaccgtgcaatttcagcttgtgcaatttatttcacctcctggctaatgggtgattatgggttctcagatagtgcatccagtaaatagtgcatccagcaaatattgtggtagagcaaagctacctacatgaacggctggattatagtaacggcaggtaaaacttgcgttgtcaaagcgctgttgcaatgttgccagatccacatggcgtagtgccgggttttggcttgcccaggcaaaggtcattattccgccataataggttggaatggcagcttgatagaaaccgctgtcagcaaaatagttactcaattttttatggctggtgactgcttcatcctgttgcaggaaacaaacaccattctgagcaacaaagatgccaccttcattcagacaacgttggcaaccttgatagaattcagaggtaaataatccttcaccaggcccgatcgggtccgtgcagtcagagataatgacatcgaatttctgatcggtggtattaacgaaattaacaccatcgtcaatgatcagattgaagcgtggatcatcataagcaccggcattatggttaggcaggtactgacggcagaattcaacgacaccggcatcgatttcaaccatagtgatgctttcaaggtattgatgacgacagacttcacgtaacataccgccatcaccaccgccgataatcagtactcgtttggcgttcccgtgggcgaacaaaggaacatgagccatcatttcatggtagataaattcatcacgttcagtcgtttgtactgtgccatctagcgccataatgcggcctaatgtcgcattttcaaagataatcaaatcttgatgctcagttttatcgtgataaagcactttatcgacagaaaaatactgaccaaagttggcgtgcagggtttcggaccaaatttctttttgtgacatattccggcttttcctccactgtgacagtcatgaaaattgtgtgcacataatagccaacaattctcacagttgcacggtgaaatttacccctttagggggatgaggaaaagcactatttaacgtaggcgaataaactcagcgaatctctggcgagagcatggcactttatcgcattggacaggtaaattcctttgagatcttggtagctttcttcattgagcttgtccatcaattggctgttgtaattagttaaatcccacttattgcgttgagcaaaataaataatggctcgtttaatttcccgatcaggaatttggctgtaaccacagtcatatttcaggtagataaacacggctgtcagatcggctagatcttcagcttcattttctgtcagcgcttttgcggggtgggaaagaccgaaaagaacgagtatgtaagtcaagagagctaattttcgcatttgtattattataatcaaccagtgtcatagtacgttaacatattaatatctttgttaggaaaaatttattttttaaaattactgtaaagatcgacttaaatcacattcccttcgcttgaccttcctgtaagggtagcccttatgtttcttttatacccgttatctttcaagttgcttctttgttggctgcactcactcaccccggtcacatagttatctatgctcccggggattcgttcccttgccgccgcgatgcatcttgaaatccatagggtatatgggatgttttttagcgattttttggttgatttgactaggaggtgaatatgcaacgacgtgattttatcagattaagtgccgttatgggcctatccagtatgttgcctgtatggagtcgtttctcctttgctgaattttatccggtattacctattcctccacaactagagccagatgcggcaggtaaaattgctattgaaatcaaagcgggaaaatccagttttaaagcaggagtggtgactaaaacttggggttataacggtgatttactcggtccggcactgaaattgatgtcaggtaaacctgtcactattgatattcgtaatcatctaccggaagagagcacggttcattggcatggtctggagattactggggaagccgatggtggcccgcatgcgatgattgcgcccggcgggagccggacggtcagttttacgcctgaacaaccggaagcgacttgttggttccatccacatacgcatggcaaaacgggttatcaggttgcaatggggcttggtggattagtactgattgaagatgagaacagtattaatacgggtttgccaaatcagtggggcgtggatgatattccggtgatattgcaggataagcgcttgaataacgagggtcagattgattatcaactggatgtgatgagtgccgctgttggttggtttggcgatatgatgctgaccaacggtgttgttttaccccaacatactgcaccacgcggctggttacgtttgcgtttgctaaatggctgtaacgctcgtagcctcaatattgcgaccagtgatggccgtcaattgtatgttgttgccagtgatggtggcttgttagcagaaccggttgcggttaatgagttaccgattctgtcgggagagcgttttgaggtggtgatagacgcttcggatggcaaatctttcgatctggtgacgttacctgtggttcagataggaatgacattaccgccatttgatcaaccgttgccggttttacgtattcaacctcagcttttttctagccgcacaatactgtcggagcagcttgccacgcttcctgcattaccctcttttaccggtttgaatcggcgtcgtttacatctggcgatggacagtcgtctggatatgcaggggatgatgatgttgtctcagcgctatggtgagcaagctatggcggggatgggaatgcatcatgggaatatgagccacggagatatgcatcatggtggtgaattaaatttccatcatgcgaacaccattaatgggcaggctttctccataacagaacccgcttttgatgtgaaacaggggcagtatgagcgttgggtgatttcaggtgttggcgatatgatgctgcatccgttccatatccacggtgcccgttttcgtattttgagtgaaaatggccgcaagcctgcggctcaccgtagcggttggaaagatattgttcatgtggaaggcaaggagagtgaagtgctggttcagttcaagcatactgcgggagtgaagcatccatttatggcgcattgtcatctactagaacatgaagataccggtatgatgctgggttttactgttagtaaataattttgttaacagattgactctggtttggcttatcagagtcggcctcactgtgccttatagtccgtagttatgtagtcttttcaatgaattattgttataggatgtacattatagaacaaaggttatacgcaattgcttctactatgaactggtgttgatagatgcttaatcagcagtaaatggacacaacaaagtattgttagtgattaccgcaggtattagactatgatacagttggttgtttgttactcagtgaaggagaggtgaaatgtctagttttttcaagaatatgggatatgctcttgtttctccggaaagggtgatggcacgcctcgttggcgcacataaagaaacttgttctgatgctgatcagaaagatgaaaagttcatcattaatcgttctggaacagttactctgaatcgttgtaatcctgatgttcagcgggctttcgctttaaacgttgagtggttgagtactaaaaaagagggataactatcaatgtgggcagctgtggttattgttgttttagtatgtggttatgtttatacaaatagtcatctaccctctagatttaagcaaaataaagccattggttggaacgcttactttgaagtagcacgacaaggtggtttttttcttatcacaggtttttgtctggctttaacactgagttgtttaatctttgctgttatgatgctactgaacattcctgtatattttggtgcaaaatatatcccttttacttttgctcatgatttattcaactctcggttagtggggacgagtattttttcttttctcatcttaagttttaccgtgttgatcagtatcagtgcatcctataacgcagagaaagattttagaaatcctgaaaagcgcaatggtatttttaaagaaattgcatctaatagtgctattgaaagccttcttttggaatcaattgaaagtggtctgttgctgttaattactttaaagtcgagaaaagtttatgttggaatggttgatgaagcgagatttcatcatttggataccgatactatcgttatcattccttttatgagtggttacagagataaagatacgctgacattttgtgccgagcataattatgctgatcattacaggaatgaaggtattacactaacttcaaagcctttgagtgtgtatcagtttcgtcatgttcttccgcttgagcagatagagtctctatcgctttttaatcctgaaacctatgataagttccaggaagttattaaagataaatctaattgaggtaaaacgtctcaaataggttttgtagttcatcagtccgaagaaatttaacaagatagacttggtagtctctttttttaatgttgttcaatacatggcagatagaatatagaaactttgcgttttctatgagtaaagaatagcagtaacaactggtgctacctggagtatttcagtttgtcatgagttattgaatggtggaggcatcatgactgaaaaatgtttgtactgctccttttgtgggaaaaagcaagatgaagtagctaaattaattgctggtccaagcgtttacatctgcaatgaatgtgttgctttgagtcagggaatcattgatgaagaaaaaaagcttaaagttttagcagtaagtcatcctcactcagcctcactgtatacgtttttggcatataattctggctgttttattgaaagttcggctatttgttccgatgaaatccttgcaaaaacattggaaataagcattgatgatttacataaggctcttagaactcttaaaaggaaaaaattaatagaaattctaccttgtgctgatgggatgacgttatattttgtgagtgggaaaaatatatgtaaaacttatgatgaagaaactaagctttacagagttgccgttaatgttttgttacaacctaatcccaaattaaagatgttgccatagacatagtgagcatcagaaaccatctttaatctttgtttgagataccccatattttcgaagaacttttgataattaccattcgattataccctatggatttcaagatgcatcgcgacgacaagggagcgaatccccgggagcataggtaacgatgtgactggggtgagagagtgcagccaacaaagaggcaacttgaaagataatgagtatatagattggtttctcttctggatactataaacatccttattcttatgccgtacttaccttgagatatcctaagggaaaggaattgtgcaacaatattgttagaataatgacatattaattggcatctcaactggttataatcctttattgattttcatatacttattcattaaaaacaactggttaaatttataatgaaacatactgtagaagcataaaacatcgtgtttttatactattagatgctttcagttttctccttttttatccttccatatcaaaatgatagcctaattttgtattttagtgttaatgtctcttttttgattgttacaatgaacggtgtatcactcagacagagacactatgttgaggtaatgaatggcacggacaaacaactcagtgacaaaaaactaaaagcattgctaggtgttaaaagggattctccggctatgattgctgctggtgaagggttgagcattaaggttttcaaaagtggacagttaagttgggtatttatatatcgctgaggtgggcgtggtagtcgcttggagcgccccactttaggtcgttaccctgatatgtcactaaaagtggcaagagaaaaacgtggacagtgcagaaggtggctcgctgaaggttttgatccaaggatggagttggaattgagaatagaagaaactttaaaaccggtgactgtcaaagatgctctggaatattggttagtgcactatgcacgcgcaaaaagagcagatgaagaacttgcaagagcgcgcagctagaaaacatatttatccccgattaggtcattatcttctcatacggtgtgaaatccgtcactgggtagcctgttttgacgaaataaataaaacgcaacctatacgagataaaaatgcttttcttacgtaattcgttactggtccggtgctggttgtgagcagggaactcaatggcataatcgataaccgcttgttctgttgttgcatcgatcctatttttgaggttagggctgcgattaactaacgcttcgactcctccttcttcgacgagttcctgatagcgataaaaagtatcgcgggatatgcctatcatcttgcaagttttcgacacattgttaagttcttcagccaggttcaacaaactggctttatgtttaatggtagggttgttagtatgaagcatgagagttaccccttgtattttgtataagggttcggcacccctatcaaaacctgtaactctcaacttttcaagttctatgtcatatctagtcgcgactaatacgattaataacaatttaatattaataatgcctttttcacttgtattaattgataaattatacgtacaaaaatagacaattacacaaggttatgcacatttttttgttaaatcaattagtttattcgcggattctattgtttctttcctatgggcaaccattacttttgtaatgcttaacattttaaggttagatgaaattattttttcgttttcagtatcgagatgactcgtggcttcatctaaaaataagatcttagggtctttgtataatgctcttgctaagcataacctctgtttttgtccaccagataagatagttcccatatctccaatcaatgtttcatattccattggcattttttttatatcatggtgtatagctgctatttttgcacaattaatagctttatctgtgtctggatgttcatcaaaaaaagttatattttccataatagaaccagaaaatagtgaatcatcttgcgctacatacccgatattatctctgatgatttttggatgtgttttattaactataactcctccaatcctaacttctcctcctgtaggtaaaatgtttcctatcattaaatttaatagtgtggatttcccacaacctgatggacctattattgccactgaatctccaggctgaatgtcaaaatataaattctctattaaataattattatttccctcatatttaaaggaaagatttttaatttcaattttatttgattttattgtttctgtttttagtagtatattggattttaattctgtttcagatagtacaatatctgataatctttcaatatggatcccaagcattttaaaagaaataaatagatcaatgagagatatagttctagactcaaattgagttttgtaagcaagaaatgatattaatatacctactgtaaatgtattatcaaagataaaagatgtacctatataaactattaggatgttttgaattccaaatataattctattggaaaaagaaaatcctagcgatagtctttgagatttaagggcagagtttacagtatttatagataaagttaaccaagaattatatcggtgattctctttgcagaaaatctttattgctcttattcctctcattgtttccataaaattggagctcagcttagctgattgtacgatattttctttagtagcttcttttaaagggtaataccatattatcctgattattatatatatgaaaatagtgacaattgatattaatgttaactgaaaattatacattgtcatgataataatagttgttgcagaaacaagactattacatatggaaataaaaaaagaagaagttaacgtattttgtatgctatcaatagacgagaattttgaaattatatcacctaaatgtcttttttcaaaaaaagaaactggcaaattcattaaatgagtaaatacatttgccttccattgtatattcaaatttgtactaatatatgtagtcaataggctttgaataatgtttattacttgctcgaaaacaagtaatactccaaaacctattgatagcaacaatattaaatttttatcttcagaaactatcccatgatcaattattaattgcatgtaaaatggcccgattagtgcaaagaactctaatacaaaagctagcaataatatttttactagtgatctttttattcctgatatgtttttaaaaaaacttaaaatgtcaactttttctttatcaattttttttttgaaatcgttatttggccagaattcaacagcaattccagtaaaacaattagagaattcattataactcaaacgtctaaatccaatactgggatccattattgttattgtattttttgatattttttttaaaactacaaaatgattaagctcccaatgtaaaatacatggcagttttaattgatttatttcattgatgtctagtttaacagctctataagatagttttaactctttagcgtagtaagcaatatcattaagatttgtacctgtaagaggaatacggaatttttttctaagcgaagataaatcaacttggtatccatgataagaagaaatagatgctaaacaagctaggccacattcagctatttctgtttgtaaaatagatggcaaattatgagaatgccaaaatatgattttttctaatttcatcatcttattcaaatgctatttttattaatagtaataagtggctcgaatatccactcgtataattttcttttttcgtgtaaaatatcagcatctagagtcattcctatctctaatgccttttttattttatttatttcaatgtattgtttttcaagttctgcctttactaaataaataggttcatttgctatgtctaatgtatggaatacggttcctatgcttttaacctcttgagctggtattgcggttctacttatggaaataactttagccttaaatattccgaatttttgatatggatatgctgaatatcttatattaactatatcaccatttttaacaaaccctatagattggctaggaatatataaattaatagagaattttttggtattggggactatattcaacaataaagtagattgttctacatgagaacctaaatcaaaattattaatatttataaatcctgatgaactagccacgataacagattccgtttggctttcaatatttataatttcttgattaactgacgctaaaattctatctatctcttgtttttctataaattgttttaatggaagttcttctaactcaaatttcttttcactaattgttctttctatgtcaatcaattctttttttgttaaacttaagtttattaattggtctgattcactattttctgcaatggttatgtgctcttttgatataaatccttttctttctaataatttgtatctgttggtatttttttttagtctatctaatttattctgttgtgatgttaatttatccttaatattttctttttgtttcattaagctttcaacatgctcatgtagtgaatctagtttacttttatgtatcttggattcacataataagtgcaacatcgttaatctggaagtaaacatgttcgtattcctttaaataattcattcggtgttttcccaccccgtgtttttcgaggacgattatttaatcggtttaccacaaaatttatttcctgatcagagatttcattaaaattggttccctttggaaagtattgtctgattaacccattgatattctcattgatccctctttcccaaggcgaataagggtgagcaaagtaaatttgggtttctaattcttcaccgatgatttcatgatctgcgaactccaaaccgttatcgaacgtgatggtcttaaccttttgttttaacgggtataatactttcactgctgctttcgcgacttctgatgcctgcttgctatcaagtttaacgataattgtatacagcgtcttgcggtcaaccaatgttaataagacactttttttatctttccctattatcgtatctccttcccagtccccaatacgttcttttttatcaacaatttccgggcgttcatcaatactgacccgatttttaattttacctcttctttcatagcgaccatagcgtttgcgatagggttttctggctattcgcagatgttgccataaatcccccccctctcttttatcttgataaatcagtctataaatcgtctcatgatgcaaagatatccctttatgttgcttcaaataatcagccacctgttcagggcttaaatctttccaaattaaccgttttatccatctttttacttccggcgttattttcacggcctttttagcaaaatgacgacgcgccaataccttcaaatgagcctgttcagggcagtatgtctggacttcttgatttctcttcaattctctgctgatggtcgatgggcttcgcttaagtgacttcgcaataaaaagctgtgaaaaacccgcttctcttaaactggaaatctggtatctttctgtttcggtcagttgtgtataggccatagtgcattttcctttggcgagaaagatgcctactatagcaactgaccgcccttctgaaaaattgcacttattagtcgaatccgcctattttatctattttatcaatggcttgatctaacgttttcttctttaagatggcttgctcttttaatttatcttgcagtattcctgtgtttaagttttgagctttgtatataacacccagaacctcgcctttttttacaaattgaccatctttaatcataaccttgttaattatccctgtctctcttgaatagacttttgtgatcccatcttcagggtaaacttgtccttttatggttgttttcctagagtaatcagtaaacataataaatattattataaacaatacaagaaggcatgaaatatatgttaaaacggtaaaaataaaggggctggtcaaaattactcgaccagccaaaggtattgctttatgctttaaagcctccttgcgaaaaaattcacttttataaatcatctataatttctaatatatcttggtaacctagtttataaattaaatcttctatgtttttttgtttactatgatcaaaaaaagaaagtagattctcgaatgatatatatggtatctcactaattttactaagaagatgtatagagaattgatctaaatttacttttgctccgttgcaaataatatatccttcatctatggatagattattatttgaatttattcttaagcgtgatgtcttggatatggaatgatgtttttttccacaaaatagtctcagatttaattttgatggaacccttttttcatcgctgaaagattttaaaaattcattatatgaatcttctgaagtaatattatcaataacatattttgctaagatatcaatttcatctttagcttgtttccatgatctcggaagtgatttccttccaatgtcaatatcggttattttatatgataaccagtttatgtactcatgggcataaggtggaaaaatgccaacagataaatgtatagtctcttcaccaagaggtaatggattatgccaccatcctcttggtagataaaggacatctccagtttccagcacaaaatcatcatatggttcagaagggcatggatacgtattttccatatcttttgattgatgtaaatatacagggtcaggaaagcttggtttgtaaattatccatcttttctttcctgataactgaattgcgaatatatctctgctatcccaatgaggtttaaaagaacttttttctccatatgataaatataggcttgaaaacggatgactatctgtaaatgaagagcaagccttagccagttgatctatttttgtttcattaattataccatttgcaactagtgttgcacctgagtttagatagtcatataacttagagtatatatatctataccgtctagtgcctaaatcattataggattcaatatattctgttttatcaataataccattgtacattaatttaataccttcaaatgaaggcaggttggaacgattaaatatattttctatttcactatgttttataaaatcatcatcatatatttttttaaaaacacacggtttcttttcgaagaaattttctaggaagtcttttttatcaatgggaaaattaattggattcatatttaatgttaatgattgttgattgtggctctataagtgagtaataagttatcttattaagaggttattaaaataaaaggtttttgtttacgtagcctcttttttttggttgatgggtgtataattacacccatttttatctaaaaatatcacggtttattagtggcaatagttagatccacttgaattacaataattggtcccagcaccattgctattccctccagaatcaattctacctcctatctctcctccgatgtagcggccagctgcagctcctccggcagctccagcaccaccacctgcaaatcgaccaacaacaacaccaattactgcaccagctgcagtacctgggcccggtgctattacagagcctattgctgcaccagctgcggctccagcatatcctccagctacactaccagctactcttccagcagctccccctgcggctgctcctgctatttcaccagcggtttctcctgctcctgcacctgcaactaaatcaaactcttgaatggtaagctcacgcataataaatttaccttcattcaggtttactaaaaataataacaatcaaatatatataagaacttatgattgtattcaaaaataattttaacgaaaaatcataatggatatgatttaatatatacaaaaaaggaatcgatactaatatcagtaaaatagttataatagatagagtaaatatcttataaaaaaaatttggttttttatcatgtgagtattcttttttgaacctttttttcaataaagaaaattcattggatattttatttgcagtgctgaacatgataatcaataaaattattgacatactgtaatctatatactcaagaataggggtgtctaatctaagtataaataccgagacaatataaactataaaaaaattaaaaaataaagcctcttttttaaaggtttttttagataattttgatatttctttggctctgtacaataaggtgtttttatggttttttattttcataaattcttgtttattatttttatagggtttttgatttgtcttgattatatttttttgttttttttatgtcaatgtcttttttttaaataaataaaataaccaaatgtggtaattatcctaacatcttgaaaatatagggatgaattaaattttaaaagaaaatattaaacctctaatcttttcaagagaaactataattaaagttatcatgataatgcgctaaatctattggatgatataaataaaaacttattgatatatttatttagtcattactttctcttattgtcagtaaaagcattcgttagtctaaatctgtttaattaccatcacagatggtcatcaatgtttccgtaggtctgagaggaagcgcttaaacgactagaaaaacttctgtagcctgaaagtgaaagcaagaattgcggtacatctgcacacctttggaagcatatattgctagtatgaacaatcctagctagtttggtgatgacggtctttttagctaatagagtaccaacggtacttcggcgtgtgaggttatggttttcattgcctttcgtagctggatttaaggtggggaagatccactttacttttatctgatttcaagtgggcatgaaacatgcgctcgcttacttttcacattagcgttaggtgatagcctttcgcacaatgggattgagctacgtctcgatctcatttcacttcaatgagcaggattgcttttgcgcatctcgctcatgcctagctatgtttgcttaaaatatttagcgggcggcttctctacacctaaataattagctcattgctaccgtttgatccttaacgttgcggcgttttgctgtgcttgttggtatttcaacgtttgcaccacttttgctgactgtttgcggacttgacgccgcagcaaaagggcagtacgacgattacaggctcatgcctgctagcagcgcagtgaatctgacacggcattttatagattgaaagagtaatggtggttcaggcgggggaggcttcggccttgccggaaggtagctaccggtactgtgaaccctgtctgaatcaccatcatcaattttctcaattaatggaaggggtagcaggaatgaataatgttagaaatgactggcatcaagccgatattattgctgcgctacgtaagcgtggtccaaccttagctgcggtatcccgtgaagcgggactgaattcttccacattagccaacacgctgtcacgtccttggcctaaaggcgaatggattatcgctaattatctcaacattcatttatctgaaatctggcctagtcgttattttgatatggacagtaatcttattgagagcaaagttcgcgagaaatcagcagaataattattctaataccgtaaaatatcagggaaatagtcacctcacttcatctcattacctactgtgttgtttgattgatgaggtagaataattggttatccatcaccgtaatctttaatacctttcgacgaaatgcgtcgcaactttctatcacgaggccagaacgtttagtgtacttatctactcactggcaacgagtcatatatccttcttttactgtaggcggtgaattctgatatgctttgcaaaatattttgttctcatgtttttgtgtgtgcgtctttgtgtggtgaacggtatatcaatcggtgtatcactttttgtaaaaagacacatgattttattttagttatcgtttaaaaatatatagttatgagtaaaccaaaacatattgtagaagttatgatctccgaactggaggttaaacagcgtattgctgaactgggaaaacagattactgaacattatcgtgacagtggtagtgatttggtgttggtcgggttgctgagaggttcatttatttttatggctgatttatgccgtgaaattcagatccctcatcaagtcgactttatgacggcttccagttacggtagcggtatgaattccactcgtgatgtgaaaatcctgaaagatctggacgaggatatccgcggtaagcatgtactgattgtggaagatattattgattcaggtaataccctgaataaagtacgtgaaattttggcgctgcgtgagccaaaatcactggcaatttgtaccttgctggataaaccttcccgccgtgaagttggtgttccggtggagtggattggttactcaattgaggataaatttgtggtgggttatggtatcgattatgcgcaactttaccgtcatctgccttatatcggccatgtaattttgctggaagagtagtttttatcatattttggaaacggcaacttttgggttgccgttttggccttaagcgggcttcaacaatgttcccttgttgaaatattaccactgcattttattagcgaaagccgatgtaagcctctatgcctaatgggagttctctccccccataaatgtgatgacaatggcgttacatttgtgtattatttagaccatatatagcataaggggatttgaaatgaacgtaataagtgagaatcgtaaaaataagacactcaacttgaggattaggcaagaggatcgggatttaatagatagagcagcaaaagtgaagggaaaaaccgttactgaatatgtccttgatacaatcaaacgtgatgctgaaaacacgttattggaacattcatttatgattgtatctccagaaatttttaatgcttttattgctaaacttgatgctccggctgttccaaatgagcgtcttatcaaaacggcaaatatgaaaaaaccgtggtgataaaatgattaatgatccaaccttgttaacagatgatcacaatttaaatagttttacttcaggaattgataccctagacaactggttaacagacagagcattaaaaaatcaaaaagagaatgcttcacgaacctatgttgtaagcgaagacagagatgttattgcttattattcgttagcgaccggctcaattatgtcagaagaggcgataagcaagtttaagcgtaatatgccaaatcctattccgacgattattttgggtcgcttagctgttgataagcgttatcaaggaagagggtttggtcgctatttagttagagatgcttccatacgtgtcgctcaagcggcagatttggtgggtgttagggggttgattgtccatgctatctcggagaatgctaaggcattttataagtctgtgggttttagtgattcgcttttaaatccaatgacgttaatgatcacgctaaaggatttaaaaacggtttttaaaataacagattaatactatttatacccaatggatttcaagatgcatcgcgacggcaagggagcgaatccccgggagcatagataacgatgtgaccggggtgagtgagtgcagccaacaaagaggaaacttgaaagataacgggtatatttaaatgaaggtaattgagatgattagtgcaagatttgactcagaaaaggctatagaggctattctgtacgttgcctctatagcgccaatttctgacgtttatcatgtgggtaaaattctgtattttgctgaccggctgcatttggagcgttatggtcggttaattacgggtgataactatcttgcaatgaaagatggccctgttgcagtgaatgcctatgatattataaaagtagccaggggagacgggcgctttattccaaataagtgtgatgttgatgtcattcggtcattgttgtcagtagagggacgtcatggaaatcatcaaatacgtgctttgcgtgatttcgatgaagatgtatttagtgattcggatattgattgcataaatgaagcaatcgaaaaatatgggaatctctcgtttaaagaaatacgtgatatcagccacgatagtgtttggatgacggctaaccagaatagtgagattccattggaagtgatagctgccagttgtaaggatggtgacaagttagttgcttatctgatttctactgagtagctgatgactaattttggtgacagattttccgcatcttttagggcggatttttttatcttcactgaccttttacaacgccgccaaagttaaaatatctgttggtttgctgctgtgagctattattactgaataatagttttggtgtatgatctatagattggtttcccatgaatatccttatcttatgccatacttgccttgagatatcctaagggaaaggaactgttcaataatattgctagaagaatggcgtattaattggcatatcaactggttataatcttttattgatttttatatatttattcattaaaaacaattggttaactttataatgaaacacactgtagaagttatgatctccgaacaggaggttaaacaacgtattgctgaactgggaaaacagattactgaacactattgtgacagtggtagtgggctggtattggtcgggttgctgagaggttcatttatttttatggctgatttatgccgtgaaattcagatccctcatcaagtcgactttatgacggcttccagttacggtagcggtatgaattccactcgtgatgtgaaaatcctgaaagatctggacgaggatattcgtggtaagcatgtactgattgtggaagatattattgattcaggtaataccctgaataaagtgcgtgaaattttggcgttgcgtgagccaaaatcactggcaatctgtaccttgctggataaaccttcccgccgtgaagttgatgttccggtggagtggattggttactcaattgaggataaatttgtggtgggttatggtatcgattatgcgcaactttaccgtcatctgccttatatcggccatgtggttttgctagaagagtagttttctcgtatttgaaaacggcaactttcgggttgccgtttttattaggcatggtgtgtagtgttgtagctggctaagtaaagccctcttattacgctatcaggagtgagccagtattggttttatttctggtcttttgtgctgtgaggcaatccacagttcatattgggactgcattcctgtccacatttcggcactagtacctaatgcggcttccagtcgcagggccatatcagcagatattcctgcattgccgtttaatatgcgggatagtgcagctctggttataccgagagcctttgctgcttccgtgacagatatgtcaccaagatattcacgcaaaactatgcctgggtgtgcaggtttatgcattttcatttcgttgccctcagtgataatcttgataattaacgagaattatatcttcgccctcaaatctaaatgttaaacgccaattactgttaacagatattgcccagtgaccgctaagatttgctccttttagtgggtgaagtttccagctaggggcattcatatcttctggttttttagccgtattcaatgcagttagctggatttgcagctttagggcatgcttaggctgaatgccagcggtagaaccagttttgaaaaatttttccaatcctttgtgtttgaagcttttaatcatactagtctcgtatactgtatatgcacactatgcggaggtcgtcatggcatgtcaacaaatacatataatttctgtaatatttaagtattcaatgaatgataattaattagtatttagattaattactcattttacattattgaggataagtaattttcttattctaaaaataattgtaaaaattgtcaaaaatattataaaagtagtctgattcacctgattaatttaatggattaattaacttttgggttttttatttctgtatgttaaaagtttttactattatgctttagtgtgttgactcaatcaaaaaaatactgaattttacattgatgatgattttttataaccttataaaaataaattaaaaatttcttacatcttaatattaataaaatcatttttcatattcattttaacttactatcgtttattttcattcagatattccattgttttttgatctttaggagctcattaatacctattttcttgggggaataggtgtggtatcgtcatattgtccattttatgaaaatattttcagtaattatgttagtttgtttattccagttttttatatttttttcttgttcatatagaaataaactttaagatgaaatatgtcagttttaattggaaaataatattttaatacatcggatggatatttattaattcaatgactatatatcatgatgaatgtttatattatgtttatcatgggttattttgttttcttcttattacctcatgcatccattcgaaaaattaaaatagctatttgaggtttaaatggctataccctatggatttcaagatgcatcgtgacggcaagggagcaaatccccgggagcgtagcgaactatatgactggggtgaataggtgcagccagcaaagaggcaacttgaaagataacgggtatattgcatttttattagcgaaagccgatgtaagcctctatgcctaatgggaattctctcctctagaaatgtgatgataatggcgttacgtttgtgtattatttagctcacctatagcataaggagatttgaaatgaacgtaataagtgagaatcgtaaaaataagacactcaacttgaggattaggcaagaggatcgggatttaatagatagagcggcaaaaggcttcgcgaacctatgttgtaaattttccactctagtttagataatatctctggagaaaaatattatcatgagtttaaagggtaaaatataatttttaagtctgagaaaaaattaaaatatatttttaatataatctataatctataatctataatctataatctataatctataatctataatctataatctataatctataatctataatctataatctataatctataatctataatctataatctataatctataatctataatctataatctataatctataaattgaaaatcttcgtttaattacactatagaaaaagttaaatataaccttttctacagcgtattttatgaatgatctaaaaaatcacttcttatgcgtcagtttggatattgtctggcgataggcaagctccagtttttcacggctgtcagccgtgacttccagatcttgcaattgaccattatggataccgtaaacccaaccgtggatcatcactttttggcctcgtttccatgctgcttgcataatggttgagtgaccaaggttatatacttgctcaacaacgttaatttcgcacagacggttcagacgctcattagggggtaattcacctagcatagaactgtgtttataccaaagatcacgaatatgtagcagccagttgttaatcaatcccagttcggtgccatcaattgcagcttcgataccaccacaaccgtagtgtccgcagataatgatatgttcaacttccagtacatctactgcatattgaataactgaaagacaatttaagtcagtatgaataaccaggtttgcaacgtttctgtgaacaaataagtcaccgggggcggcatcaattagtttttctgctggtacccggctgtctgaacaaccaatccataagaaatgaggtttttgtgattttgctaattctttgaaaaaaattggattttcttcgttaaccgattctgaccactgcttgttattggcaagcagctcttctatttttttcatcatgattcatagcctggtagtgtttctttaagatagaatcatatacaacatcaattgaaattttaatattttattgctgtttgtttttaatctttctactgtttttgtaaagcaagtcaggcagaaaagcagcattatgtttccacattacacgcaaaagcgaccagataataaaggtgttttgtaatttatgacttatgcattggagttaacgcagcttactaagacttacactgatggtgttaaggcactgcgtgggatagatctgaatgtggaagttggagacttctacgcattattaggtccgaatggtgcagggaaatccaccacaatcggcattattagctctctggtaaacaaaagcagcggtaaggttaaggtgtttggctatgatattgatactgatattgtcaatgctaaacgccagttaggtcttgttccgcaggaatttaactttaacccgtttgagacggtgttgcagattgttctcaatcaggccggttactatggtgtaccgcgaaaagtagcgcaagccagagcgaaaacttatctgttgcagttagatctgtgggaaaaacgcaaccaacgggcgattcgtctgtctggtgggatgaaacgacgcttgatgattgtacgagcgttgatgcatcagcctaagttattgatccttgatgaaccgactgctggtgttgatattgaacttcgtcgctctatgtggaattttttgcaagagctgaatgcccaaggaacgacaattattctaacgactcactatctggaagaagcagaaatgctgtgccgtaatattggtattattcagcatggtgaattggtggaaaacaccagtatgaaaaatttactcagtcgggtggagtctgaaacattcttcttcgatctggcgacacaaaacccaattcttgaactagtaggatatgattatcgactgctggatgcctctactttggaagtggatgttcagcgtggtcagggaataaatagcgtatttacccaattaagtgctcagggtattcatattttaagtatgcgtaataaagcgaaccgtctggaagagttatttgtcagcttggtgaacaataagtaaggagatagtaaatgattcagttgtactgggtggcgctaaaaactatctggattaaagaaattacccgttttggtcgtatctgggtacagactttattaccaccggttattaccatgtcgctctattttattatcttcggtagcttgattggttcgcgtattggggaaatgggcggtgtcgattatatgcagtttattgtccctggccttattatgatgtcggtgattactaactcttatgccaatgtttcttcctccttctttggtgcgaaattccagcgcagtattgaggaattattagtagcgccggttccgacacatatagttattgtggggtttgttggtggtggtgttgcccgtggtgtctgcgtcggtattctggtgacattggtttctctattttttgtgccgcttcatattcatgcgtggtggatgattgttgtcacgttgttgatgacctccattttgttctcactaggggggttgctgaattcgatttttgctaaaacgtttgatgatatcagcattattccgactttcgtattaacgccactgacttatcttggtggggtgttttattcattgacattattacccccattttggcaagcggtttccaagttgaatccgatcgtttatatgattagtggtttccgttatggtttcctggggattactgatgtttctttgataattacgttgagtgttttgactgcatttattgtggctttttatcttgttgcttggtatttaattgaaacagggcggggattgaggacttaaattcggtaatttattaacggtttctatttttgaagtcccctaaattttgctggctaattttaggggactaaatttaatttaagccacttgaaccggcacggctttggcgatccgcctcataatattatcaccatcgaagtaagcgatattaggcttatggtgacgggcatcttcgttagggatttgtacatatgagcaaataattagcttatcacctaccgcagcacggcgtgcggctgctccgttaactgaaattattctagaaccacgttcagcggcaatagcataagtggaaaagcgctcaccgttatccacgttatagatatcaatagcttcatattccagaataccggctgcatccatgaaattctgatccattgcacaggaaccttcataatgcaaatctgcctgagtgactttcacccggtgcaatttcccctgtagcatcgtacgcaacatggtttttctcctgattcgatgacaaattagaacctttttgcatcaataacgcctgatacaacggcgattattgcgttaaatctacctgctgattatcgatcatacgggtctgccctaaccaggcagccattagaataacggcttttttgctttcggtatttaacggtgccaatgtttcagcgtcacggataaacaactcatcaggtacaaagcccgcttcgtgtagctgtgaagaagcttgagtgagcaactgttctgtgtgacgttcaccctgtgccattttttcagcgatagatcgcatgatcttgctgagttctggggcgattcgatgttcatcggcggttaaattgttattacgtgaactgagagccaggccattttggtcacgcaccgtgggtactgaaaccagcgtaatatcataagccaggtcggcaatcattttgcgaataagttgtaattgttgaaaatctttttcgccaaaataggttaaatctggctgtaccagattgaacagtttactcactacggttgaaacaccacggaaatgaccgggacgactggccccttccagcatggtagaaagctcaggaacatcaacgtaagtctgatgttccataccatcagggtatatttccttatcagcaggagcaaataccagattgacaccgtgttgatgaagtttttcgcaatcttcctgtaaggtacgaggatattttgccaaatcatctggacgattaaactgcatcggattgacgaaaatagagacgatcacaatatctgcttgccctttggctgtatcgactaacgtcatatggccgtcgtgcaagttacccattgttggcaccagtgcaatgcgttttccttcctgacgccagcggcggatttcacggcgtagaatcggtacagtttcgacaatcagcattgcttaatactccttaggggaatttattaataaaatgagtgttctttaccagggtaaataccactttccacctgttctttatataggcgaatggcatcacgtatattccctgcttcttcaaggaagtttttcacaaatttaggggggcttacggtaatgcccagtgtgtcatgcatcactaaaacttgcccatcagtcacattaccggcaccaataccaattaccgggatctgtaattcatcggtgatacgtttagctaaatcaacgggtacgcattctagtactagcagttgtatgcctgccttttctaaggtaatggcatcttttatcaattgattcgctgatacttcatcacgtccctgaactttataaccgccaagaatatggactgattgaggagttagccctaaatgggcgcaaacgggtacagaacgctcggtaagcatgttaatggtatcgtataaccagctaccgccttcaagtttcaccatgttagcgccagcacgcataagcttggcagcgttttcacaactttgctctggcgtggcataactcatgaagggcatatcggcaatgataaaagtataaggtgttccggcacggacacagcgagtatgatagacaatatcttcaaccgtcactggaatggtggtatcagccccttgcacagtcatacccagtgagtcaccaaccagcatgacatcgataccttgctcggcaaacaggtgggcaaagctggcgtcataagcggtaatagtcgcgaatttacgtttttctttcttgagctgattcagatcagtcatggtcattggtttcattatctatcttccttctcctgcaatttttcttgttatgtacagaaatcggccgcggactgaactgagatccctatatgtagtgattagaatcagaggactgcggttgcagccagagtgccaagccgttttctgggatgtgtttcagtctttcagataaagcttccccatcaggaaatataagatcaggggcaatttcagctaacgggtagagcataaattcgcgctgttttagtccgtagtggggtaccgttaagcgttcggtattaatcacttgatcaccaaatagcatgatatccagatcaagtgttcttggcccccagcgttcatcttttcttacccgtccttgggtcagttcaatcgcctgagtgtgattgagtaattcttccggtgctagcgtggtttccagtgcgactgctgcattcagaaaatcaggttgattctgcggccccatcggtttagtacgatacagtgaggagcaggcaatacattctgtttccggtaaatcttttaatgcagcaagtgcattttttacttgctgcataggttctgccagattgctaccaacagcgatataaacacgagccataattatcagccgttcctgctcagtcttggtttatagtgacggcgtggtcgtgtacgacgacggacaatctcactgcccagttcggaaatcatactccgttgctgtgatgcattgacttgctgaaattctccccaccaatggacaagctctttgagctcattgcgattttcaacattggctctcagttccagcaaatcataggcagcacggaatttagggtgttccatcagcttatttgcccgcttaccatgacggcgtggcagacgtaactgtaattgccagatatcacgcatgatggttgtcaggcgcttaggaatggcaatggagtggcattgctcatccagaatgtcattcatcgccaatgcaaaagcatcgtagtaagccagaccaccttcttgagatagcttttccgcatgttcgatcagtggataccagagcattgcggcgaataaaaacgccgggttaacccgtttatcattttgtaaccggtaatcggtattcttcaaaacctgattgactatacgttccattggtgaatcgttattttcggtgaaatagcgttgaatcaatgggaaaagtggttgaaataggcggtattcgcgcagaagttgataagtgctgtagccttgaccggtttgtaaaagttttaaagattcttcaaacagacgggcaggtggaatattactcagcagaaaagccaaacgagaaataggttcggcggtaccttcgctgatggtcatattcagtttgctagcgaaacggatcgcgcgcagcattcttactggatcttctcgatagcgggtttcaggatcgccaatcaagcggataacaccggtttccagatcatgaaggccaccggcataatcacgcagagagaaatcattgataccgtaatagaggctgtttatggtgaaatcgcggcgcatagcatcttcttcaattgaaccgaagatgttatcccgcagtagcataccgctttgtgcttgttgtgactgatttttatcatcagaacccgtttgttcatgtggaccacggaatgttgcgacttcaatcacttcctgaccaaacataatatgagctaagcgaaagcggcgtccaaccagacggcagttgcgaaataatttacgcacctgttctggcgtggcattggtggcaatatcaaaatctttcggcttcgtaccgagtaataagtcacggacaccaccgccaaccagataggcttcaaaaccggatttattcaaacggtaaaggactttcagtgcattttcactgatatctctgcgggaaatacgatgttgttcccgtggaattatcgttatcgataaatccgaatgagggttctcctgttcaacctcccttggtatctccacattagataagggttgataaggggcttggcgattagagtgaagagttacgtactcttcttgagcagaacggtcagatccggtgactggcctttcactggctgcctgtagttcgcggttatttttcccttcgcggatcaataagttacggcagaaatttgctactcggttaaaaatggtacacctcgataagtaactaatcatataaaacaaataaaaaacagcggctaatcatagcctactgtgtattttttgagaatggttgttatgactaaccgtaactttattcatgttatctatgtgtattttaccttgtcgtggaattcggtctagatcccaatgtgctgttgctttttgcaacaattgatcacgagaaagatcttgccagttttctataacagattgattaaggaaagataatgcctcaatcagtaatggtcggggatcatccaatgggatcggctgagcatgattctgtttggaaagtttattgccatccttattcagagcgagtggtaaatgaatatagtcaggtattttgagatttaactgccgataaagcgcaatctgacggacggttggttcaatcaagtcaacccctcttaccacttcggtcaccccttggtaatcatcatcaataacaaccactaaattataggcaaataaaccgtcacgacggtgaataataaaatcttcttcagccatgaccggatcggcgttcagatatccttgcaatttatcttcaaaaccgtaaaccggatgacgctgtttgaatcgaattgctgcatgatcaatgggtaaatttaattcacggcagtttctatcataaaaaccattaatctggtgaatacgttgacgggtacaggtgcagtaataacttaaaccttgttgttgcaattgattaaggacatgacagtaggcctcatggcgctgagattgatagagaatttcaccatcccaatgtaaaccgtaatgctcaagtgcgtgaagaatacggctggcagcaccgggaacttctctaggcggatcaatatcatcaatacgtatcagccactttccctgacaagcacgggcctgcaaatagctgccaatggcagtgattaatgaaccaaaatgcaggtcaccagaaggtgatggggcgaaacgcccaatataagcctggggacgttcagattttatcatatggagatcagcggggttgtttatacggcgtcataaagacgccgtattcggaacaccattaattagccagccatctgtttttcacggatttcggctagggttttacaatcaatacacaaatctgcggttggacgggcttccaaacgacggatgccgatctcgatgccacaggattcacaaaaaccgaaatcgtcatcttcgacttttttcagggttttctcgatcttcttaatcaatttacgttcacgatcgcggttacgtaattcaagactgaattcttcttcctgcgccgcacggtcaactggatcagggaagttcgctgcctcatcttgcatatgagatacagtacgatctacttcatccctgagctgattgcgccatgcttcaagaattagcttgaaatgcgccaactgggcatcgttcatgtattcttcacctggcttttcttggtaaggttctaccccagcgatggcgagaatgcttaaggacgaggttttacgtttttgcccttcttgcataatacttctcctacacacgcactatcaaacaaacccctagcgggggaaaaaaacaggccgctataaatagcagatggagcatgggttggcaattgttcctgccattagtttcacaatggtgtgaaagcaaatgtattgcacgcctttacaccttgtacaaccgggctgcaaatattaggtgagtcggtaagttaatcatttcagtaaaaaagttaacttatcgcctaaaaccatcccttttcccgtcatgttggcctggtaacagataacttcgaccccagagttttgcgcttgttccaaaagagatgaataattatgatcaatatgtgcagccgccgcgacctgattgatcccagaatgcagaacagcaaaaaataaaacagctctttgcccttgttctgctatgtgctgcaattcccgcaagtgtttctgtccgcgggtcgtgacagcatctgggaaatagccacaattttcttggagcagtgtcactgatttcacttcaatatagcaattaacctgctgttctgcttgtaacagtaaatctatccgactgttctcttcgccatatttcacttcccggctgatttttttatattcagaaaattctggaatggcattttgtgcaatagcctcggcgactaaatcatttgctctgagcgtattgacacaaatccagtgaccagccggtgtttctgtcaattcccaactgtttgggtatttacgttttggattatcggaggtggaataccaaaccggatctcccggtgtcgcacagccggtcatggcacctgtattggcacagtggatagtcagtgtttcaccttccggtgtgatgacatcagccaggaagcgtttataacgacgaattagcgtggcagattgtaaaggtggatggaattccataaaaactcctgaatgacggatggcataagattgaagcaggcaatgctacaatgttctttcagtcgaccaaaacatctttccacaacatttcgtcttatggtcgaattttacccgtctatctgaccgggatttttcgtttgatttatacccgtcatctttcaagttgcctctttattggctgcactcactcaccccggtcacatcgttatctatgctcccggggattcgctcccttgccgtcgcgatccatcttgaaatccattgggtatatacggaattatcacttttattccctgatttttttaatcggctacgtaatgattggctggagtaatctttatccgaaataactgcttttgaacgatgtttcataaaactgtttttatgctgaataccaagactatccagcaggtgtaatgtatatttagtcgaatctgccattaaatagttatttaacggagtgtattattccgttgcttttgaaacccctattatcgcttaaaattagtaaagaatttcaagttgaacaggatcacttattattttaataaccccagtgtcagatttttcaaattcaatttgatatttttcattgtcaatgcctgtaataatattatctagataagaatatgcgaatcttattgatttgcttttagcccattcaggtaataaatgcacatagtagttaaaaactataaaccctctttttttatttatgtaagttatacttagaatgtcttttaacatcattctaccgtaacaaaaatcaccatttttattaaattctttttttcctaacttggttaagttccataatttattttttcctcttttaaaatccaatttcactaatccagcatcaacaagagattccatgttcgcattaacccatatagaattttcattaattgatactggccattcagtttcacctaggcataataatattttatcgtcaatttttttttgtattttttttctaaaagattcattttctcctgaatgacaaaaaaaagataaaaaaacaaaaaaaaataaaaaaaatttcataaactacactccatattatattctgtcatggcatcactaacatttttatattttttctttgtaagataggatttagtataatcccaataataatttgaaataccaggcacttcattgttatattttatatcatatttaataaattctactgggtattctccaaatatgtcatcatcattattttttttgcgaaaaaaaataatataataaactccattttttacccttagctcgtaatcttgtatttttatttcagaagcagataatttaaaatcaaaccaagtaaaaccagtatcatttgggagtggaactatattaaatttcccatttttattttttataaaaacagttaatgtgttacttggatgagatgtattgttttcaaatttggcataaaaaattacatctttttttccatcaccattcaaatctataagattgattccatcctttagatttaccttatttccgcaatgagaaaatgcctcaaacgagaaaagtaaaataaaaataaggtaaaatttatttttcatttaaatagctcctaactaatctaaatccaacatctggcataatatatcctgaactatggttatcacaactggataagctgtttgcatgggaaagataacttccaccacaaaaatagtacaacttaactgtaccaagttcataactatcatagacccattcagaaacatttccactcatatcgtataaatctaagtcgtttggagataatttacctacaacctgtgttccaaaattacttgtattaaactctggataccatgccaccttcttagaatcattgcttccagagtgatagtatccatatcttcctaatcgtaaggcaggctttccgccccttgctgcaacatgccattcatttaaggtaggtaaacgatagccattagcgtttgtatttataaagatctctaagtttttgtctttttttctaatagttttatttcctttttgaaaatatactggagtgagttttaatttctcacttaatgcatttgaaaaaagaatggtatctaaccatttaatactagtcacaggatgcctgccttcttcctgctcaggaggaaggcaatcttcataatgtgccccattacatccatcatcaaaatcataaccatttaatatagcccattcatatacctctttatattctgaataagtaacttcattcttcatgatataaaaagaatttaatgtaacattagaatgagattcataattttgagcgccaaacacactaccaacgtaaaaatcaccgccttcaacaaagctgagtttcatgttatcaaatgaatatgcttttgatgacattattatagataaaaacaaatatacccgtcatctttcaagttgcctctttgttggctgcactcactcaccccagtcacatcgttatctatgctcccggggattcgctcccttgccgtcgcgatgcatcttgaaatccattgggtatatcttttacttttaaatttagatacatttgttgtattacggaagagtattcttccggtagataactcatcaaattgaaactcatttgttaattcatttaaatttttatcaaaaccatatttgataaagcaaaattcaaagcctaattttaaactcctttcatgactttgtaaaaataattaagaatctaggtaattaaaatattagtacattaaatgaatttatcaatgtatttgacattaaaattatttatatatctaatctaactatttgtttttaaaaacagaaaccgcaatattactgtatcaatggcaattatgcatgattatattctctctgtaccctgtattggcacagtggatagaattccataaaaacgcctgaatgacggatggcataagattgaagcaggcaatgctacaatgcaggcggttgaaagttaactttctttggtatggagtatttgtgtctttattgcctgtatatgagatcgtcgaacctgtcctgagtgcgttgaaaaattcacaacaggtcctgcttcatgctccggccggtgcagggaaatcgacggctttgccattggaaattttgaaaaaagccgctttttccgggcgtatcataatgttagaaccacggcggattgccgctcgcagtgttgctaatcgccttgccgctcaactgaatgaaaatatcggacagaccgtgggttaccggatgcgttcagaaacaaaagtgagtgtaactactcgccttgaagtggtaacagaaggcattttaacccgaatgttacagcaggaccctatgctgacaggggtttctctggtgattctggatgaattccatgagcgcagcttgcaggctgatttggcgttggcattgttgctggatgtacaggcagggctgcgggatgatctgcgcattttgatcatgtcagcgacgctggataatcagcggctctgttctttattacctgatgcaccagtgattatttcagaagggcgaagctttcctgtgaccagacattattgtcctttgtctgctcaccaaccttttgaacagagtatcgccaccgttgtattgcggttactccaacaggagcaaggttctgtgctgttgtttttgccgggtagcggggaaattcaacgggtgtttggactgcttagcgggagagtggctgaggataccgatttgtgcccgttatacggtgcgttgtcattggctgagcaacaaaaagcgatcgaaccttcaccatctggacgccgtaaagttgttttggcgactaatattgcagaaaccagtttaacgattgaaggtattcggttggtgattgatagtggtcttgaacgcacgacgcgttttgaacccaaaaatggtctgactcgcctgatcactcaacgtatcagtcaagcttctatgacacaacgagctggtcgggcaggacggttagaagccggtgtgtgttggcatctattcagccaagaacaggcagaaagagcggtagagcatagtgagcccgaaattctgaatgctgatctcagtagcttatggctctccttattgcagtgggggtgtcatgatatttctcaattgcactggctagatataccacctgcggcggctctggcggtggctaagtcgctgttattacagttaggtgcaatcagtaacagtggtcagttaacgtccagaggcagtaaaatggcggaatccggtagtgatccgcgtctggcagcgatgttatgtgcggggttggaacaaggggccgatatgctggcaaccgccgctatgctgaccgcgattctggaggagccgccccgtgatggtcagccggacatcacttattgggttgagcagcgacaagctcattggttacggcgggcaaagcagttagttagaaatatgggtgatcattttggtgagccagtcggtggatttgctgcaatgctattagcccaaggtttccctgacagaatagccaaaaatcgggataagggagggcgttttcaactgtcgaacggtctgggaacgataatcgatgatgaagaaacgttatctggcgaatcgtggctggtggctccttcattattacaaaacagtagaaatcctgacgcgcgtattttgctggcttgtcctctggatattgaacgactgatacagcaacagccgaatttattcagtgaacagagtgtcgttgaatgggatgataacaaagggacgttgcaggcttggaagcggctgcaatgtggcagcctgacagtaaaagcccaacgattggcaaagccttccgatgagcaattacaacaggctctgctaaactggttacgcagtgagggattacatgagctgaattggtcacctgcggcggttcagttgtgcatccgtatccaatgtgcggccaaatggttacctgaaatgctgtggccgccagtcaataatgatgcattaatggcttctcttgatgattggttaatgccgttccttactggtgtgcgtgatttgaaagggctgaaacagattgatttgttgccggcactggaaaatttgctggattggcagcaacaacagtgtctggataatgaactgcctatttattacactgtccctaccggcagtcggatagcaatccgttatttcagtgataaaccaccggtattatcagttcggatacaggaaatgtatggtgagtggcaaagcccatctctggcaaaagggcgggtaacactggtgcttgaactactatcacccgcccaaaggccattgcagatcacacaggatttggctgctttttggcaaggatcctatcgtgaagtgcaaaaagagatgaaagggcgttatccaaaacatttatggccggatgatccggcgaatacggtaccgactcggcggacaaaaaaatattcgtaatagagtttaacccttgtttttgccggcgaataaattcattaaaaaatatgaaaacccaataatagcatctaaacggtttcggagaattttggaatgtctggtgaagatcgtcaaccaatcggacgtaaaggcaaaaaatgggtatcccgccgtaaacggtcaataaaaagacggtatctgttggatgatgataatggctatgaagatgaggactacgatgatgaagaggatcaactcatgacaaagaaaggaatgtattcccgtccacctaagaaaaagtggcgttggttctggttgttattcaagatattcattatttttgccgtattattggcggcttatggtgtctatctggatgccaaaatccgcgatcgcattgatgggagagtctgggaattacctgcggcggtctatggccgcatggtcaatcttgaaccgggcatgaactacagtaagaaagagatggtacatctgctggaagggatgcagtatcgccaggtgacgaaaattacccgtcccggagagttttctgtcagaggtgaaaccattgaaatgttgcgtcgtccgtttgatttcccagacagcaaagaggggcagatccacgctctgctaactttcagtgataaccgtttggcggggatcgaaaatctggaaaatcagcgtcagtttgggttcttccgccttgatccgaagctgattaccatgttgcagtctcccaatggggagcagcggctatttgtgccgcgttctggtttccctgatttactggttaacaccttgctggcgacggaagatcgccatttctatcaacatgatggcatccgtattctttccattgggcgtgcagcactggctaacttgactgccgggcgcacggttcaggggggaagtaccctgacgcaacaattggtgagaaacctgttcctgaccaatgaacgcactttggtacgtaaagctaatgaagcctatatggctgtgctgatggattatcgttacagcaaagatcggattctcgaactgtatctgaacgaagtttttttaggccaaagtggtgatggggagatccgaggatttccgctggcgagcctctactattttggtcgtcccgtggatgaattgagtttggatcaacaggcgttgctggttggtatggtgaaaggcgcttcactctataatccgtggcgcaatcctaaactcactctccagcgtcgtaatgtggtgctcaagctgttacaaaaccagcaaattattgatgaagatctttataaattattaagtgctcgtccactgggggtaaaaccgaaaggtggtgttattaccccgcaaccggcgtttatgcagctcgttcgtaaggagttgcaggacaaactgggggatagagtgaatgatctgtccggcgtgaaaatcttcactactttggacccagtatctcaagatgcggctgaaaacgcagtagaagaggggattgccagtctgagaaaaactcgcaaaattgctgaccttgaaggagcaatggtaattgtcgatcgcatcagtggtgaaatcagggcgatggttggtggttctcaaccgcagtatgctggatttaaccgagcaatgatggcgcgtcgttcaattggttcactggcaaaaccttcgacttatttggcggcattgagtgagcctgatcaatttcgactgaatacttggctgtcggatgaacctcttgcggtaaaacagccgaacagcaaggtttgggaaccgagaaattatgaccgtcgtttccgtggacgtgtcctgttgatagatgggctggcgaattcattgaatattcctacggtgaatcttggattggcagttggtcttgatcatgtcagcaacacattgatccggcttggcgtaccggaggaagtgattcaacaggttccagccatgttactgggttctcttagcttgacacctttagaagtggcgcaggaataccagacgatgacgagtggcggcaatcgtgcgacgctttccgcgttacgttctgtcatcgcggaggatggcaccgtgatatatcagagttacccacaggctgaacgggctgtaccggctcaggcggcttatctgacgctatatggtatgcagcaggtggtggcgaatggaacttctcgttctctgaatgctaagtttggtcgttataatctggcgggtaaaacgggcactaccaatgatctgcgtgatagctggtttgccggaatcgatggtaaagaagtggtgatcgcatgggttggtcgcgataacaacggaccgaccaatctgacaggcgctacaggggcgttgaatgtatatcgccgttatctggaaaatcagacgccgctgatgttgaataacattccaccggaaggcattgtcgatatggcggttaatcaggatggcagctttagctgtagtggcagtggttggcgaacattaccggtttggacttatgatccacagagtttgtgccaacaaacagcggtatcagcaccggttcaacagcaagaagaagcaccgggctggttgcgagagatgtttggccaataatcaatatttgatttgagatgaatgacaaagcgctgatctttaatggtcagcgttttgattttctgagtttaacggctttccaaacataccgaaccattattttttcgactttatacctgtcatctttcaaattgcctctttgttggctgcgctcactcaccccggtcacatcgttcgctatgtgaccggggattcgctcccttgccgtcgcgatccatcttgaaatccataggggatatatgatcatcgcaatggcggtgattatctgcttgtgttatgtaattgtttataaattgtttcaaaacatgatgttttacacctgtttggggcaataaaatcagcaattttcagaatattcctatatgttttctaagcgaaatgtgatgaattattaatcattcgtattaactcatggtgataatgatatgacgataatttcaattagatccactctccatactgtaaatcaatggagagatgaataatggcaataggatatttcttgcttgttggtgataagacaacctgtggcggacagattattaccggtgaccacaccatgacatttaatggacgggcaaccgctcgtgaaggagataaggtcacctgtggcaaacatcccggtagttatacgattgtcggtggtgtatcagatgtgtttgatatgggacgtaagttggctggcacattggacagtgtgagtacttgcccttgtcgggctaggtttatcaattcggagatggacagctatgagaagcaggagcaacccaataatcgggctacatcccctgttaatatggcgacccaaaatttctcgtcgccggtggaggaagcgagaaacgttcagcccgcacctcctgtgactaaagagcctccgataccggtgtttgcgaaatcctgcttacggggtaaaggttgtaccgatgccggaaccgaagccgaaccggcggataacttcggcagagtggcgatatatcaggttccgtcatctcccactccggtgacgccgcaaaaaccagaaccgcctccgcaaggtgagaaacagccgtctgaaccggataaaccgcaggataaaaaattaccgtggtataaacggtggttccgtggtggtgaagataaagccgaagcggctgctgctgccgtggccgccactgctcgtagcgcggtagcggaaggggaaacgctggtgatgcgttacattggcggcggcgctatcagtgcaggacgttggctagcggcgccgaatccggtgacagttggattaatggggctgttttattcacctaagctgaatgagggtgaggaggattacttagatccgtctcgcctgagacagatagcggaacagtacggtaaagcgccaactcgtgtacgttttcgctggatcagagatgaaaaaagcggcaggatgacggttcagggatatcacgtcagcccggaaggcggcttggataaagtaccggttcgcatgatgacgctgaatcggaccaccggtaattacgagttttgggaaccgggggaataccggccgacgattttatggacgccgaacgaacaggaattcaaggtgccagcccataccgggaatgaagaacagccgtttattccgtcgcaaataaccgtgttgccgatcccggagaaagtgggcagcgatattgaatcgttacctatgccggaagagaaggattttcgtgattatattctgatcctccctgttcctaatatgccgccggtgtatgtgtatttgagtaaaccaccggtgaaaccgttggaagtgggagaatatcaggatctggctggacgtagccgtaatgatgggttggatattgatcatattccttctaaggcagcgttgaaattgtttttaaaaaataagttaggtaaggctgcaacagataaagacatagataagatactcaatagtggtgtatccatagctatccctcatagggttcacagaggttatagtgaaacttataagggcaggaatacaaaggcgaaacaagttaaagacgcatcagatattagagtggcggtagacagtaattttgatgctcaagttcccggcctacgagaagaaggctatacagatgatcagttgaacaaggcacgagaagaattacaccaactgaataaagaacaagggtggtataaatagtggctgacattacgaaattaattaaatgtcttggaagaaccgctgaaacgttagttgaagatggtgagatatctaaaggaatatttaagtttcattttgaaggggatgaatcgttcaattgcgaacctgaaaaaggaatcacattagtttttgattctaaatctaggcaattgaattcagtccagataactctaattgatatacatggtgatcatgatgaatataatggtagtttgccttatccatttttacctttaatggataaggcaatgataagagctgaatatggagaacctatggagtcaaaagatatgatagaagcaccggttataggtgttattggtggatacgatgcttatataaatcgtataaaatcttgtccaaacgtggaagtcatttttatttatgatgcttattatcgagtgagagctcttactttcaacactatctgagaagagagcttttttacatactataatcggcggatagtggctagtaaaccattatccgtgcttgtatgctagaggttaggcatgagtattaaggagcttattaatagcttagggaaaacagcagatttattaattgaaaaacaacttatcccgacaggaaagtttgaatatttgtttgaaggagacgatgaatttctctgtatgccagaggatggattaacgttagtttttgaagataaatcaaggttgttaatctcagtcggtattactctaattacgtctgggccaaggatgaagatttatagaggtgaaatgccgcccccatttttgtctgaaatggataagacaaaggttaaatctgtgttaggagagccatcagagacaaagggtgctgttaaattgccagttattggaatggttggaggatgggatacttatattgaccggatgagcgatcaatacccaaatacacgaataatttttgcgtattctacagatcagaaggtgagtaatataacgtttaaaaaaatttgagtgaagtgtgatttctaattatttgtctttggtaaagtggatagcgatattaaatcgctgcccgtaacgtaggaaaaagatttccgtgattatattctggtattcccagccgattcaggcatggagccgatctatgtgatgtttaatattcctcggaatcaaccgggagtggtaactggtcggggacaaaaaatcgaaggaaactggttaagtcgagcagggcaagatatgggagcaccaattcccagtcagatagcagataagttgcgtgggaggaagtttaataactttgataatttcagaaatgcgttttggaaagaagttgctaatgaccctgagttttctaagcaatttaaaactgcgaatatgggaaatatgaaaaaaggaaaagctccagctccaaggaaagacgaatggaaaggaaaaaagaaaaaatacgaattacatcataaaaagcctatttctaaaggtggagatgtttataatgttgataacattagtgttgttacgccaaagagacatggtgaactacatagttggaggtgaataaactatggaaaataatgtaatgaatattactgaaaatgaatttttatccttgataaagaaaatatttaatggaaattttcgaacagaggaggaagaatcagaagctatagatgaatttgaaagaatttcagaacacccctctggcggtgatttaatcttctatccagaagatggcattgaagatagtcctgaaggtgtgcttgaagtagtaaaggaatggagaaccaaaaacggcaaacctggctttaaaaaatagagattgagtaagtgatgaaaaggattataaaaatccttttcatcacaatcaaagtgaatacctcacaactatcatactgatattgaatcgctaccgatttcggaagaaaaggatttccgcgattatattctggtatttcctattccgaatatgccgccggtgtatgtgtatttgagtaaaccaccggtgaaattgtttgaagtagatttgtatagaaattttgcggggcgatcaagaaatggaacacatgcagaatttcaacactctatctgaaaagggggaataatggcagatattatgacgatgattaaaagtttaggacaaacggtggaacaattagttgaaaaaaaacttatttctgataaaaaatttgaatacctttttgaaggagctgatacgtttaattatgagcctgaggctggtcttatcttggtattcgatgataaatcgagaaaattgaggtcagttgaatttacactgattagtatttctggacgttctggaaatagtgaaatgtatcatggggaaatgcctcctccgtttactctatcaatggataaagttgctgttagagctttgctaggcgaacctgatgttacctcaggggaaacaaaaattcctgttattggtgttgtcggcggacatgattgttatattcgtaaacttcactttatataccccaatacaaatattcgtgtcctatatttaatagatttgcgtgttcgaggattggtttttgagagggaaatataatttttcctgtgaaaaatttgaaaatctaagtggaagatatatcagagaaggggatgtaaaaataatgacggttaatgttgaatcgttaattaatagtttaggtagaacctaccaagatatttatgatgagggactaattccttataaaactaaaccaacagggtttgccggtgatagtatagtatgcttggatatggttaaagaaggcgtttttctgtctttccatcgggaaggaaagcgattaaaagaaattacattaactttgtttgacgagaagaattctttataccagtttactaatgagttgccttcaccattaattccattgatgtgccgacagtgggttcatgaacaatttggcaaaccagaaaaatttcttccaccgagaaaaaggctcaaaaaagacattggctggactgagttatattcattgctggattttcgtattccgaccagtatgaagtttgattatgatctattggagcaagttatatcagtgacattcttacctacatcagaagtacgttggtagtcaataataagaggggaaccgttttaatagccaactcatttaaataaagaggtaaagtagaatggaactgaaaaataagttggaagattatacagaagctgaatttttagttctgctgaataaaatcttcgatggtgaatgtaaaactgagaacgaatatcacagtttagtaaaacatattgagataattaccgatcaccccagacgaaatggactaattttttacccagaaaatggagttgaagatagtccaggaggtgtgcttaaagttataaaagaatggcgagctaaaaacggaaaacctggcttcaaaaaataaaagggattcggtaaattaggaaaaagatttccgcgattatatttagctgatttgcgtgttagatggttggtttttgagctgggaatatagccttagcttaatcaagaacagaggttatgaaaataatggcaattaaatagcgtttcataattccgctacacatggccttcttcaacccattgttatatatggaattatgagtggtataagatatagcactattttagaatcttatttaacattaaagagttaattgataatttgggacaaacagcagaacaaataattgaaaaagagattattccagctaataagtttgaatatttctttgaaggagatgaggagtttttttataaacctgaatcaggtatgagacttgtttttgatgatgtttcgaagcggctaaaatcgagacagttcacattgattaatatctatgacaataacggtgcatataatggagaaataccttatccattttcacattcagtggatagaacaattgttagagcacttatgggggaaccagattctgctgatggcccagaaaagatccctgtcattggcatggttggtggatatgattcttatacacgtaagttgagtgagcaatatcctaatacagaaattcgttttctctatttggctgatttacgggtacatgcattaatctttgagcatattgtataaacgctttctggaatatttttctactttcatttaatagcagttaataaaccattatccatgtttatatgctataggtcagatataaataaagaggttatataaatagtgacgataaatgtagaggcgttaataagcagcctgggtaaatcttatcaggaaatttttgatgaagggttaattccttataagagtaagcctagaggagattctggtgacgattatgtgtcgctagatatgcagaaagaggggatatttctggcttttaaccggaccagcaagaaattaacacatgtcacgctgacattgatcgatgaagaacggccccgctatgtttacccaaatcaattgccattccatcgggttaatccaatgacgcgtgcattcagtttctaccgatatcaactcatctcataatgttccatatataggatattactgctgttaaagtctataatgtccttttaataggacattagcatataaggttgtgattgatatgtaatgtgcttataattgctcattatagataataacggctttaatgtgtcattatgggagcgttatgatgttacatgaaaaaacagcttcagcaattgcagaagagttgggagaacgcttgaaacaagctcgactaaacaatgatctgactcaagctgaaattgctgagcttttaggcgtcacaagaaaaactgtactgaatgctgaaaaaggtaaagtccaattagagatttttgttgccattatggcagcattaaacttaaccgaacaattagatctttttcttcccaaacaaagtatatctcctattcaactcgctaaacttcagggaaaaaaacgacaacgggcatctggtcttagaaaaaaccatattgaagaggatacgccagaatggtaatggaagttatcaacgtaatttacaatcaacatgaagttggtgcgatgagttttgaccctagtaaaaacttgggcttatttcagtacgaccccagctttatcgctaaagggatcgaactgtctccgttgaaaatgcctttgtcaaataaaatctacagttttccagaactggactaccacacgtttaaagggctacctggattgattgcagactcattgccagatgattttggcaacgctgtactcaatgcatgggttgcagctcaaggtaaatctcctaacgacattacacctttgcagcgacttcaatatactgggaaaagggggatgggcgctcttgaatacgcaccagcaaccaaaatgagaaatcttacttcctcaaaacaagtagaaataggttcattggtttctattgcccaagaaattcttaactcccgtggaaattttactgctgagttgattaataatggtcaggaagatcgcgaggccatgatgtcattactttccgtgggtatgagtgctggcggagccagacccaaagctgtattagcctttaatgaggattttactcaggttcgctctggtcaagttaaagttcctgacggttttattcactatcttatgaaatttgatggtgtcagtgagcacaacaaaaatcaggaaacctttggtgatccactaggctttggagcaatggaatatgtataccatttgatggcaaaagactgcggtatagacatgatgccttgccgattactccatgaaggcaataggcgtcactttatcacacagcgttttgatcgtctggggaataaaaaaatccatgtccaaacattaaatggacttgctcacgttgactataaaaaaccaggctccttctcctacgcagaacttttctttgttgctaggcagctaaaactatcggctaaggctgctgaacagctactaagaagaatgtgctttaatatcattgctagaaatcatgatgatcacgctaaaaacttcgcgtttatattaaaaggcaaaaaatgggatttggccccggcttacgatttagcctacagttacaagcctgacagtagatgggttagcagtcactggatgagtttaaatggtaaaagagacaacttcactcggcaagatttttattcattggagaaactaagcccactattcaccaaaaaaatggtcaatgggattattgaggaaaccatagaaaaagtctctgcttggagtaaggtagccgctgattttggtgtaccaaaatcgttgattgatctagttgatacaaatttgagattgaatatctaatattgaaatccttattttcgaaaacaagctataaatataggcagcttaggagttgttattaaaaaagccctgcattacaggacatttgtgtgagagggcttgatgcagatggggattatgtgcttgccgatgctgatttatcagcttcatcttgagcctgtttccggttcttcggcctgactattctttcgttcaactctttggctggcgcggcagcatggcgctccaacgtggatgctattttgcaagaaattggactattgcaggcttgatcttttgttctagaaaatccttggatgcaattcgtaagaccttctcctttcgaatcacttggggcgatttatatcaacaagcccaaaaatataacatttgaatttgcatataatccataactctattccaaagaagctattgatagtttactccgatattatgggagattaatgaatgccattatgtccagtcagtaaaaagagaatatcagttatttttgtgattaatgttttttagatgcagatttatattaatagcaggtaaatagttaattgataaatagaatattcctattatatttttaaatggttattaacttaggtgtgatttttatattgctcatctattaaaaaaaccttcatattttctcactgtttttgataataaaatcaaacaacttagataatgattttcgatgtccatatgctaacatgattagaaattcgttattttacaattacgagcgtcataaataatcacttatataaataatttgatgttatattttcaaggaaatatatgaaaaatgcagtgcaaattgtgaatgaggctttaaatcaaggaattactctgtttgttgctgataatcgattacaatacgaaactaaccgtgatagtattccgacggaattattcaatgaatggaaaaattataaacaagagttgatcgacttcctgagccagatcgatgcagaagaagaaattcaaacatatcaattacagaatatccaacgtgatggcaatgcagaacattatccactctcatttgctcaacaacgcctgtggtttatcgaccaacttaccgaaggtagtcctcaatataattgtcccggatatttgagattacgggagcaactgaatttcaacgcttttaaggctgcggtaaaaacattgcttgagcgtcatgaggcgttacgtacccatattaaagttattgataatgagccacggcaagtcataacacattgctatgatttacccattacacgacatgatttgaccgcattctctgaaactgagcaagaatctcaaatcaaaagattcagtaaagaagaagataacttggtttttaacctcagtactgatttgatgttgcgtattcgcctgataaagctggctgaaaatgattatgtgattatttataccattcaccatattgcctgtgatagctggtcaatagagatctttgtcaatgaacttatcaccttatatcgcgcgtatagtaaaggaaaaatagccccattaccgccacttaaaatccaatataccgattatgctcaatggcaacgaaattggctgcaaggcgatattctgaaaaaacaactggattattggcaaacccagttatcaggtatttctccacttcaccgttttccactggataacccacgaccagagaaacagagttttgaggggcggcttaatgaacaacgtatttcaaaggatttgacacaagaaataagagtattatgtcaccaacatgaagtcacattattcatgtttctggagacagcctttgccgtattgttgagtcgttacagtaatgaaaaagatattctggtcggaacaccacttgcagggagaaggcaccatgatattgagcctctgattggcttttttgttaactctctggtgatcagaacggatttatccggccagcccactttcagtgaattattaaagcagaacagtcgcactattctggatgcttatgcacatcaagatctgccatttcaaatgctggtagaaaaaatgagtccgggacgaaacttaaattataacccgatattccaaatcgcttttactctggagaatactcagtgtgatacggtactggcgcaggataataatattgagtttgaagaacgtctgcttttgaaagtccgatttgatttggaaattcatatttatgaagaagaggaggggggattatccctgttatgggtttatgacagcagcttgttcaacaatatgactattgaaagattactcgccaattatgaaaccttgcttgctaatattgttagtgtcatgaagccatgcattggttccgatctgatatacaaggaaccctctgtccatgatattcctctgttagcagaagctgaaatacagactttattacatgaatggaatggcccgcaggatcatatccagcatggcggctgttttcatgaactatttgagcaacaagctgcgcggtatcctgaaaaaatagccgttatttttgacggcaattcattaagttatcaggaactaaataaacaagctaaccaacttgctcactacttgatagaacaaaagatcaaaccagaaacattggtcgcgctctgtattcctcgttcaatacgcgctgtagtcgcgctactggggattattaaagccggcggagcttatttgccgttagatcccagctatccgaaatcccgtcttcaatatatgttagaacacagcgaagctgagttcattctgaccgaaacaaatctgatagaaaaactcccaatcagccaacagaaagtcatctgtttggatactgagacaatacaatcacaattgcagcacatgcctgcggacaatatcgctgaacgcccattcccactaacggaaaataatctggcttacgttatttatacctctggttctacgggtaaaccgaaaggagttatgttggaacataaggggtgggtaaatctggcactttcgcaggcgggtttatttggtgttgattcatatagccggggattgcagttcgcttcctggagctttgatgccatgatcttagaaatatcgatgacactggcgtatggagctgcactttatttaatttcagaaactcaacagcatagccctgaatatttggatgagttagttgataaacatcagattacccatgctgtattaccacccgctttgctgccttacctagactttaacaaatggcgttccgtttcaaccttacttttagcaggggaagcggtaccaccacagatcgccgttcgttggtcacagggcagaaaactgttcaacgtctatggcccgacagagtgtactgctattgtgacttcgggcttattaacggatgacaaaattacgattgggaaaccattgcctaataccgttatccgtattcttgatccatcaggcaatttagttcctgttggtgttgccggggaattatgtattggcggcatccaactggcacgcgggtatttgaattctcctgaaacaaacgcaacgaaatttatgactgatttgacgggcaaatcccaatcccaacgtttataccgaacgggagatttagcccgttggttgcctgatggtagtgtggaatttattgaccggattgactctcaagtcaagattagaggattcaggattgagttgggagaaatcgaaactgtactggtcgggcatgatgctttaagcagtgctgcggttatgacttatgggaacgataaaagattgattgcctatgtttgtccaaccaaagattggctggataaaaaagggctaaaatttaataccgacaacgtttctcaatcctccgatattaaagctgaactttctgagctacttgaatcagcactgaaaaaacaattaccagaatacatggtgccaagcctttatattccgctagagcgaatgccactcacgttaaataacaaagtgggcaaaaaagcgttgcctattccaaatgaaaatgatttccgccaacaaggttatgtcgcgccaagaaatgaagtagagagaaaaatcagtcagttatggcaagaagtgttgggcgttagtcaagtcggcatttatgacaacttttttgtgctgggtggtcactctcttcaggcaacccgccttatcagcttaatacgcaatgatctaaacattgaaatactgttgagcagtgtctttgagcatccaacactggagcgattagcacgaatcgccacgattcatcaggttaaagaaaaaagaaagcatttccaggctggacaagagacaacacagaaactattggaaggtgatatatgaaaaatgcggcacaaattatcaatgaagctttaaatcaaggaattactctgtttgttattgataacaaactgaaatataaaaccagccgagacagcattccttcggaactgcttaatgaatggaaacaatataaacaagaattgattgatttcctgaagcaaatcgattcagaagaggattcggacactcaccgactgcaaggtattccgcgttatgatcgtgcggaacattacccactttcatttgctcaacagcgtttgtggttaatcgatcaactcaccgaaggcagtccgcaatataactgcacaggtgatttcaggttgagagagtcgctcaatctcaacgcttttgaggcggctatagcaacattacttgaacgtcatgaatcgctgcgtacttatttcaaaattattgataatgagccccggcaggttatcgcgactgcttatgatttgccgattaccatacatgatctgtccacacttgcagaatttgagcagcaacaacaggttaaacaactcggtgagcaagagtggaaacaagctgttaatctcagcactgacctgatgctgcgtattcggttgctaaaattagcagatgatgattatttcattctctatacgattcatcatatcgcttgtgatggctggtcgctggcaatctttatcagtgagctgctgacattatatcgtgcttattgccaaggcgagggtaatcctctgccaccattacccgttcaatatactgattattcacaatggcaacgggattggctgcaaggggatattctggaaaaacaactggattactggcaaaaccaattatcagctatttctcctcttcaccgttttccattggataatcctcgaccagaaaaacaaaattttgaagggaatgttcatccacaacgtatttcaaaagcgttgacccaagaaatacgagcactgtgcgccaaacatgaagtgacgttatttatgtttctggaaacggcttttgctgtgttgttgagtcgttacagtagtgaaaaggatattctggttggcatgccgcttgccggacgaagacaccgtgacactgagcctttgattggatttttcgtcaattcactggtgatcagaacggatttatccggtcagccgacattcagtgagttattaaaacaaaatagtcgtacgatcctggatgcttatgcacatcaagacctgccttttgagatgctggtggagaaaatcagcccagaacggaatttaaattataatcctattttccagatcatgtttgcagtacagaataatcaacgggatacaacgctggagcaggatagcatcgtgacatctaaagaacgttctctgctgaccacccgatttgatttggaagttcatatctatgaagaagacgaaggtgagttatccattggatggatctctgacaccagcctgttcagaaatgcgaccattaacagattaatcgccaattacgaaattttgctgactaatattgttgatgtgatgaagcatcatgcgggtatcagcgagccgtccgttcatgaccttccattattggcggatgctgaacggaataccttactgcatgaatggagtgggccacaaattccttatccgaccgggaaatgtttccatgaactcttcgaagatcaggtatcacaacaccctgaaaaaaatgcactgattttgggcgatgacaccctgagttatcagtcattaaatgaacaagctaaccaattggctcactatctgctcgaacaggggatcataccgggcacgttggttgcattttgcataccaaggtcattgcaagctgttgtggcattattgggtattcttaaagcaggtggcgcttatgtaccgttagaccccagttatccgaaagcccgccttcaatatatgttggatcacagtgaagtcgaattcatcctgaccgaaactcacctggttgaaaaactgccaatcagccagcagaaagtgatttgtttggatacagagacggtacagtctcagctacaacatatgcctacagataatattactgagcgtccacttccgctcacggaaaatcatctagcttatgtgatttatacttccggttctaccggtaaaccgaaaggggtgatgctggaacatagagggtgggttaatctggcattctcgcaagcagatttatttggcattgactcacattgccgggggttgcagtttgcctcctggagttttgatgccatgattttagagatgtcgatgacattggcctatggcgcaacactctatttgatttccgaaacccaacggcgttcccctgaactgttggatgaagtggttgaaaaacatcagataacccatgcggtactaccaccggcactgcttcctcatctgaattttaataaatggcgttctgtctcaactttgcttttggcgggtgaagcagtaccaccacagattgctgttcgttggtcacagaatagaaaactgtttaacgtatatggcccgacagaatgtacatccattgtcaccacagctttactcactgacgagaagattacgattggaaaaccgttgcctaacgttgtgatgcgtattcttgatccggaaggtaatttggctccgatgggcgttatcggggaactgtatattggcggtattcagttagcacgtggttaccgaaacgcaccggaaatcacagcaaggcagtttatccgtgatccattcagcccacactcaacggatggcggggaaaacaggctttatcgaacgggcgatttagtgcgttggacaccgaatggtcaattggaatttatcggccgtgttgactctcaggttaagatccgtagtcaccgcatagagttgggtgaaatcgagacagttttgtccgggcatgatgctttaagtagtgctgttgtggtcgcttatggtcaagatgaagataaaaaactcattgcgtatgtctgcccaagtacagagtggttaggtgagaaagcggttgaatttaacgcaagcagcgttgagaactggacagaaatttttgatgatcagtaccgtcaaaccacaacgaaacctacaacgaaacctacaacgaatagtactcaaaaagagagcactcagaaaggtgatgtagttgcatcagacagtgatttcggcggctggatgaacagctatactgaacagccgattgcccttgagcaaatggaggaatggttaacaggaatcatgcacaggattaaagccctgcatcctcatcgcttactggaaattggttgtggtaccggattattgttgtatcgctatgctgaacagtgcgaatcagtggtggcgaccgatatttcggctgaggttttaaatcggcatcaacatattctgcaacaacgtggctggtcacatgtgcagctcagaagaggcgatgcgctcaacttaggaacattgagcgctgatgaatttgatactgtcgtgattaactcggttatccaatatttccccaatgttcaatatctggaaaaagtacttgaacagttaataccggcggtggaagcgggtgggaaaattttgctgggagatatccgcaatttagatctattaaccgcccatgctacagcaatagagcaaagtcatcttaacgggcagcgtattcaggtagggacgctggcgaaccgtgttcagcggcgtttacaacaagaacccgagtttttactcagtccaacttattttgcccaattaccggagcgttaccccgaaattggtcgggttgatattctggttaaacgtggcatcggcgacaatgaaatgttgcgttatcgttacgatgtcatattgcacaaaagaggtgaaaagaccaaatcttgtaatgaattgttttcaaattggcatcatttcgattcttttgacagtctgcgtaatttgttacagatgggcaccgaggatatattgggtgtttcaggtatccccaacgccagaattaaagatgacctcactttggcagaagggctgcgtcactggtcagccaatcagatgataacgccacccgcaaatgttggcagtttctccccacaggcattacaacaggttcaggaattcgaatccttattgcaatacgctgaacaatgtggttatcaatgcggcattacatggtcacaacagcaacctgatttgctggatgtgatttttagtcgtggagagttaccgccggtacaagcacgtgctgactataatcaaacccatttagctaattatccgcaaatttcggccatcagtggggaactgtcagaattactcgaatccgcactgaaacagcaactgccagaatatatggtgccaagtctctatattccactggaacgaatgccactcacattaaataacaaagtggataaaaaagcgttaccgatcccaaatgaagatgatttacgccgacaaaactatgtggcaccaagaaatgaaatagaaattaagattggtcagttatggaagcggttattgaatgtcagccaagtaggcatctatgacaatttcttcacattgggtggacattcacttcaagcgacccgccttattagttcaatacgtaacgaattagaaatagaagttccgttgagaagtgtttttgaacacccgacacttgagcagttatcacaggtggtcactattcatcttatcaaagaaaaaagaaaacatttccaggctgggaaagaaacaacgcaagaactattgaaaggtgatatatgagaaatgccgcgcgaattatcaatgaatctttagagcagggaattactctgttcgttactgataatcgtttgcaatacgagactcgccgcagcagtattccacccgagttgctcagtgaatggaaacagcataaacaggagttgattgattttctgaaccagcttgatgcagaagagcaaactcaaacgcatcactttttgcaagatattcagcgtgatggtaaagcagaacattatccgctttcatttgcccaacaacgactatggtttattgatcaactggatggaggtagtcgccaatataactgtatgggggatttcaggctgcgggaatccattaacatagaggcgtttgaggcagccgttaaggcattacttgaacgccatgaagtcctgcgtacccattttaaaatcatcaataatgaaccgcggcaatttattgccgcggattatgatttaccgattacagatcatgatttatctgcgttgtctgaaactgagaaaaacgatcaggtaaaacaaattagtaaggaagaagaaaatctaattttcaacctgaataccgatttgatgctgcgcgtccggttaataaaattggcagaagatgattatcttattatttatacgatacatcatatcgccttcgatggctggtcgatggcaatatttctccatgaatttttcacattatacaaagcttattgtcagggtaaggcaaatccgctaccgccgctgagaattcaatatgccgattatgcccagtggcaacagagttggttgcaaggtgatgtgctgaaaaaacaactgacatactggcagaatcagttagctggaatttcacccgtccaccgtgtgccgctggataatccacgtccggaaaaacaaaatattgaaggacggcttcatctacagcgtatttcagcacatcttacccaagcaattagagcattatgcaccaaacataacgttacactatttatgttcctggaaacggcttttaccgtattactgagccgctatagcaatgaaaaagatattctggttggaacagctattgccggcagacaacatcctgatattgaacctctgatcggtttttttgttaattcattggttattagaacagatttatccggtcagccgacgttcagtgaattattaaaacagaacagccgtaccatcctagatgcttatgaacatcaagctttgccgtttgagatgttggtggaaaagctcagcccggaacgaagcttaaattataatccggtatttcagatcatgtttgcagtacagaataaccaacgtgacgcaatactgggacaggatgatattattgaactcggggataatttactcagaacaactcggtttgatttggaaatccatgtttttgaagaagaacagacagacgaattatctatagtatggatttcaaataccagtctgttcgatagtaataccattgaaagatttatcgccaattacgcaaccttgctttctggcattgttgaggtaatgacagatgactcagtcaataaagagccctccattcatgaactcccattattgtcagaagctgaaaagcatattttactgcatgaattaaatgggccgcagaaccattatccacaagggcgttgcttccatgagctgtttgaagaacaggtggcactgaatcctgaaaaaaccgcgctggtttttggtgaggaaaccttaagttatcaggcggttaatgttcaggccaatcaattggcgcattacctgattgagcaaggtatccagccagataccttggttgcaatttgccttccccggtcgttgcaaacagtgattgcactgctgggcatcctcaaagcgggtggtgcttatgtgcctttggatgccagttatccgcaagcacgcctgcaatacatgctggagcacagcggggctgaagttatcctgaccgaaacaccgctggttgataaattgcctatcagtcagcaacgcgttatctgtctggatgctgaaacggtacatttatatgtacaaaacctgcctaccggcaatatcgttcatcgtccggtgcccctgacagaaaatcatctggcctatgtcatttatacctctggctctaccggccgaccaaaaggcgcgatgttggagcacaaggggtgggtgaatctggcgcaggcacaagccgcgttatttggtgcggatgctgatattcgcgggttgcagtttgcttcctggagcttcgacgccgcagtgttggaaatggcaatgaccttggcctatggcgctacattgtatttgattgcagaaacacatcgccgctcgcctgaatggttggatgagatggttgaaaagtaccacattagccatgccgtactcccgccagcgctgttgcctcatttggatttcaacaagtggcgcacagtttcaaccttgttgctggcaggggaagccgtggcaccgcatatcgccgcgcagtggtcgcagggcagaaagctgtttaacgtttatggcccaacagagtgtacttcgattgtgacctctgccttattaacagcaaataagcgagtgacgattggaaaaccgttgccgaataccgtgatgcgaatcctgaatgccgacggtaatctgctgcctcttggcgctgtcggggaactgcatattggtggcatgcaactggcgcgtggctaccgtaatgcaccggatatcacggaaaaacagtttatccgagatcctttcagtaccaacccggcagaccgactttactgtaccggtgatttagtacgctggacgctggaaggtgagttggaattcattggccgccgggattcgcagatcaaaattcgcagccatcgcattgaattgggggaaatcgagtcggtgctggcggggcaggagattttaagtaatgctgccgtgatcgttgatggtcataacagtgaagagaggaaactcattgcttatgtttgcccgagtaccaattggctggcggagaaagcagccgattttaatgccgattacattgaaagctggacagagatctttaatggtcagtatcggcgggagataacagaaaatattgttaccgatactaccgatgagagcgataacaatagtgatttttatggttggataaatacttataccgaacagccaatcgcattggaccaactggaagaatggcgagtgggtaccatgcggcggattgaatccctgcatcccagcagcttattggaaattggttgtggatcgggcttattgctatatcgttacgctggacgatgcgaatcagtattagccacggatatttcagcggaggtattggcgcgtcaccagaagattttgcaacagcgtggctggtcgcacgtggagctaagaaggggagatgcactgaatttgggcactatcacgcctgatcagttcgataccgttgtgattaattccgttgttcaatacttccccaatattcagtatctggaaaaagtcattacccagttattacccgcggttaaatccgggggaaaaattctgctaggagacatccgtaatttagatttgttaactgcacatgtaacagccatcgagaaaaatcgcctgaatgggcaacgtatttcggtgggtacgttggcaaaccgtattcaacagcgtctacagaaagaaaaagagtttttattgagtccaacctattttgcacaattgccgacgcgttaccctgaaattggaagagtggatattttggttaaacgtggtgttggcgacaatgaaatgctgcgttatcgttatgaagtgatattacacaagtgcgataaaaatgcggaattatgttgcaatttacccctaacttggtgcgattttaactctattgaagatctttatcatgtgttggagacagggaaattcgatacatttggtgtctctggtattcctaatgcccgtatcaaagatgattttgatttagcggaaggtctacgccattggccatctaatcagattatttttctaccaaaagatgtcggcggtttttctccagaagccgcagagcaagttttggccctcgaatccttacttcaatatgcggaacagtgcggctaccagtgtgaacttacatggtcacagcagcagcttgatttactggatgtgattttcagccgtggtgaattacctcaagtacaggcacgtttaggttatagccaaacgcatttagctaattatccgcaacttcctgctattagtggagaactcgcagagctactggaatccgctttgaaaaaacaactgccggattatatggtgcccagtttctatatcccattggaacgcattccactgaatttaaacaataaagtggataaaaaagcgttacctattccgaatgaaaatgatttacgtcgtcaggcttatatcgcaccgagagatgaaatcgaggaaaaactctgtcagttatggcaagaacatctaaaaatcaatcaaattggtatttatgataatttcttctcactcggtggtcattcactcttggcagttaagataaccgcttccataagaaatacgttaaccaataatttcaatatgcatgagctgtttgcaaatccaactattgttcagattgcaagtgtgattcgtcacagtcataagcatgaaatatctgcaccgaagacaacacacaatatatctgatcacaatgcatttgatggaaaaatgccgatttcttattgtcagaaaatgtattggtattttgtgcaagaagcgttgttggaggacagtttccacgtacccattactttgctgatggcaggagaattggatcgcagtgcgttggaaaaaagtttaaataccatcttagcgcgacatgaaagtttacgttttaagttttatcaagaaaatgggcaaattttcatgcagcctgataacagtatgaaaatcaatcttcaagttatcgaagcgttaccaagaggaatcgagagagaccaaattattattgaaattaataaactctggcaagagaaattaagaacaccttttgatgtttataatggtccattaatcaagacatttctactgcctgtttcggaaacaatcacggtattattgattgatgtgcaccatattatttccgatgggtggtctgtcaatatcattatgaatgagtttaaacagttatataccgcttattcacaggggcaagaaaacacattgccacccgttgccatgcaatattctggttatgtttatgacttacaagaaatccatgtgactgaagtagctaaaaaacaaattaaattctggcaacaacaatttgctgatgttaattcagaacgcgattttcctgtttctttcagaaagcatctggcttcaaaatatcgatctcatgcccatcatatcaaaatacctgattcgctggataaagctgttttacaatattgtgaaactcacaaaatcacaccttatatgttatttatggctttgttccacacttgtctttttatgtactccggtgaatcacaacttattgttacctcaccaaaagctgaccgaactcgcatcgaaagccatcaaacaatagggttattcttgggtgacttgatagtaaaatccaatattaatcaggaaatgagcctacaagaaatcattaagcaggttagtcagtctattcatcgcgccatagagaatgctaatatccacatgtctgttgtgattgacgtggtgggggaaaaggcgagggataatatatttaacgttctgtttaactatttggatgcacaaaatttctatgattttatcgacatgtctaaagatgaaaaattatcattgccaaatcttgaggtggaagtgatagataccgaaataattccttttgaatcacttgggatgaatttcttatacatgccacaaaatatcaagtgtgaactccattacaatccggaactgtatacagaagcagtcattgataggatggctatatattatgaacgactgttaaacgtcatcgtatccggccaagaaaaagagagtatcagtcagttttatgattaaatttttctgagatataaagagattggcctcagggatgaggctaatcgtgacatctgaatacgaatatgccgctgtatatatatacccgtcattctttaccatgaagtttgattaagatatcaggtattgggattaacgtattatgcgatagtaattttgagatttactccacaggctgctgcatagcgttcaagtgttgcaatacttgctttcattgggtttttttcaaccttagctactgccggtggagtaattcctagtcgttcggctaactgcgaactattaatacctgctttctgtttcatgttttgaatgagctcgtagagttcttcttcctgtttagcagcttcataagcggcctgagctttgggggatgagagggcttgcgccttcacttctgaaaatggaatacccttaactttcatctgtcatttcctctaatctttgtaatgccagtttgatttctgtcggtggagtcttcggggttttctttataaatgtgcgaagtatataaattcttcttcccttagcataagcaaaaattgttctggtgatgtctttgttgcctactacggcgctgagcctatgattcaagttacgatatttcagtagcaatcgtagcggtgagtgtgacatcaaattgatttatcagtttatgattattaaatctcttttgatttatgtatcaagatctgtgataggatttgggatattccaatcaatatcaggaggttgtatgagtcaaaaagctaaattgtttatggatgggaagcgtcaagcggtacgtttgccagcagcttatcggtttgactctgatgaagtttttattcgaaaagatcctgagacaggagatgtaatactgtcctgtaagccacacgattgggctggattttttgcggcattgaagggaacaactattattcccgacgattttctgagtaaagaagcgcggggccagcaagaacaatcttgtgacccattcgaaggatggcaagaatgagcgccgtaaaaatacggcgctattatttgaaaacaaagaaattatttcagcttggcaaagcagcgagcggctgcattgacagtacgctgaatatcttcatccgtgtgagcaatagacataaaacccgcttcaaatgcagaaggcgctaaataaaccccttcatcaagcatcaggtggaagaaatgtttaaaacgttcaatatcgcaattcatcacatcctgatagcaagtgacggtttctgcatcagtaaagaaaatgccgaacataccgccgacatggttaaccaccagaggaatattggctgcttttgctgatttcgtcaggccagcagccagattatctgttagctcagtcaaacgctgatgtacaccgggttgagacacttctttcagacaagcaagaccggcagccattgcaatcggattgccggataaagttcctgcctgataaacagggccaattggcgctagtttctccatcacttcataacgtccaccgaaagcgccaacgggcataccgccaccaatgattttgccaaggcaagttatatcgggttcgacatcgtaataagattgtgcaccggatagagcgacacggaaaccggtcatcacttcatcaataatcaacagagcaccgaactcatcacacagcgcacgcagaccggggaggaattctggttgtggcggtacgcagttcatattacccgcaaccggttcgacgataatacaggcgatctcttgtggatattgttcaaacgcttctcgaactgaactcaaatcgttataggtacaggttagcgtatgtttgacgaaatcaaccggaacccccggagagttgggttggccgatggtcaatgcgccagaaccggctttcaccagcaggcaatcagcgtggccgtgatagcaaccttcgaatttgatgatcttatcgcgatgggtgtaaccacgggccagacggatagcactcatggtcgcctctgtacctgagttaaccatgcgtaccatatccatcgatggcaccagttcagtcaccaattgcgccatttccacttcagcggcggtgggcgcgccaaaactcaatccttgctccgcggctttgataacagcattacggatagcgctgtggttatgtcccaacaccatgggtccccaggaaccgacataatcgatataggctttaccatcaacatcatagagataagcgccatcagcatgtttgataaacagcggagtaccgccaacaccattaaatgcacgtaccggagagttgacgccgccgggaataagttgttttgcctgagaatagaggatgtcggattggctcatgaaaggctcctgaatctatttttaagagggtttgtcgtttgcccctcggattataatgctcttagaacgataattccgggtttattctttacgtaatcaagaaatggtgaatcgacaacttttttattcgcagcaagtgaagatgcattccttagcattgggccgtgatctgtcataataaaaatcccggtatgtgtgacatccaatccggcaagatgggtatatattcctatataatcgcccgtttttaggttcttaataaccgcatcattgatcttatcacccggaatatatttgatatctcttttggtaacacctagtccggggatgtattcgctaccatcagcctttttattcaggctttttgtgattgcaatgtaagaagaacttatttcatccgttacatctttggcatttaatttttctctggttgaccagtctgtaaggaaatgttttctttgcaaaaagcgaatctttccgtcgatatatcttgtctggatgagattttttacaaaatcactttggtcgttggatttccttagcgattcgacataatcaaggaaagtaaagcagtctagtccgttgaagtcgataactaatttttcaggttcagtaggggagccaataagtttgtttgcggcataaggtgtgcccaggaattgataagagacgtcttttattatttcaccgggattctctttgtttcccggttttacctggttttctataatttcattaatttttttcgaggtatagctgtcaatatcggcttgtttgctatgagcggtacaacctgtcaaggtgacagcaagcatcagtggcaacatttttcgcataggaactccataatggttactttgaaaaacattcaataaagtaactaatcatgatgataaatcaatattttttctttcttaattgttaattgattaatggagggtttaactacaagacccacgtttgtcactcaaggtagccgctatggtaaacaaatgcgcgataactttttggcggttcgtgtgttattgaaatgacaaaacttgaacgaactaatcaggtattggataattcgagttattaatgatcggcaaatttttgttctcttctgaatatttttgtcgagttccagtctggagtaaaaatgatgagcgatgatatcgtattacctttgcagtttacggatgccgcggctaacaaagtgaaaatcttggtttcggatgaagaaaacccaaacttgcgtttacgggtttatatcaccggtggcggatgcagtggctttcagtatggttttacctttgatgatcaaataaatgaaggtgatatgaccattgagaaacagggtgtggagttggttgttgatccgatgagcctacaatatttagttggcggttgtgttgattataccgaaggtctggaaggttcacgttttatcgtcaccaaccctaatgcgaagacaacctgtggttgtggttcttctttcagtatctgatttcaggcgatttcccgcgataggtctgtgaatatcatatgacctgtttgcgggatatttttgtcatcctttaaatgtttctgattgatcaggaaccattatcgttcaattgctggcatagctgttcggctgccagaatgatgcgcggtcccgcgcggtgaaaccaatcttcatgtaatgtaatgactttggcacgcaattgtggatgccagaaattttcaattaatttgacctgttcttgcccaccactgataacaattatttcaggtttcctgatgagtacttgttcacgactgacttgaggccagggaacagggctgttggcaaaaatatttctgccgccacagattgaaagcacttcactttgcagtgtctgtcctgaagtagtgaacagagggtaagtaccgaattgtaaaaaggccggtttgggggttgtagtggcatattgttgttgcaaattggcaaatcgttggcgaagttcagtcgcggatttttttgcttgttctggatgaggactatattcagcgagtcgttctaaatcctgcgctatctgttcggtggttgtggggtcggaataaaagattttaatgccgaaagcagcaagttgttccagtggacgttggggattaccaccacgccatgccagaatcagctcaggtttaagggtaataatgcgttccagattgatgccttgccagttagcgacttgctcaagtttacgggcttgagggggataatcagagtaggcgctggcggcaatcagattgtcacctagcccggcggcataggctaattctgtcgttgacggagataaactgattacccgtaagggagcagcatacagagaatggctgaaactgctgagaaacagtaaaagcgataatccaattgaacccgtgctttttatccatttcatagatgtacgctctttaaaacatgaaatatatcgcccgtaaacacgcccgaaaatattaattagggcgtgtcggtaatatataccctatggatttcaagatgcatcgcggcggcaagggagcgaatccccgggagcatagagaactatgtgaccggggtgagcgagtgcagccaacaaagaggcaacttgaaggataacgggtatattatttatctttactcagcgttgccagcatggcgttgaccattaatgtagattggcgagctgccacggcaagaaattcatcaaaactgatatgagattctttatctgccacatcagagatagcacgtaccaccacaaatggcgtgttatattgatggcagacatgccctattgctgcggcttccatttctaccgccgtcacttgtgggaacgtcgcccggatacgcgccagaggttctgcgccgttaataaatgcatcaccactgcaaatcagcccacgcactgcgttcagattcagtgaatgaatacatttttctgccagatcaattagctggtcatccgccacaaaagccgcagggcattgcgccatttgaccgggttcataaccgaaagcggtaacatcagtgtcgtgatagcgaacttcacgggataccacgatatcaccgatttgtaatttcggatcaaggccaccggcagatccggtattaataatcacatcaggctgacaatgttcaagcagtaaagttgtaccaattgcagcagaaactttaccaataccagattttaacagtgcgatctccacgccgttgagtttaccggtatagatttcgcagccacctcgtgacagtgtttggcgatcttcaatttgattgcgcagtaacgtcacttcttgttccatagcacctatcacgcctactttcatgatgtcatactcgctgttgattaattaatcatataaaatcattccatgtttgagtttaacatctaatacggaacaatcagataatctgtggtgtaaaacagtgctatctcacaagttggagggataaatgtccgggatagactttagtcagaagcttaactatcagcgtaaataccgtcagtatcatgttgatcctaatgatgaagagcaggttattcgccaatttgaaagcgatcgtgggcggattatgaattcagcggctattcgtcgtttacagcaaaaaacacaggtttttccgctggaaaataatgccgctgtccgcagtcgcttgacacattcattagaagtgcaacaggttgggcgctatatttcgaaaacgattattaatgaattgaaaacgcgtaatttgctggccgattacgggttggataaacggctattatcatttgaaagtttgattgaaatggcttgtttaatgcacgatattggtaatccaccatttggtcattttggtgaagcggcaattaaagattggtttgccaaaaagctcgatcttaatttttccctggaaaatattaagcgggaagatcgatgtgaaatctccgcattgcgtttatgtggtgatgtgaaaaaagatcgctttcgtcgccagttgcgtaaagatttatgtcagtttgaagggaatgctcaggctatccgtatggtgcatagcttattaaaactcaatctgacttatgcccagcttggttgtattctaaaatatacttgccctgcttttcgtcttgaagaaataccaaatcaatttaattatttgatgaaaaagccaggtttttattggtcggaggagcattttgtttgcgaattacgtcgtgagcttaaaatgggtgagttctgtcgcttcccactgacttatattatggaagcagcagatgatatctcttattgcattgccgatttggatgatgctgttgaaaaagcgattttcagcgtcgatacactgatgggatatttggaacaggagtggcaagaaaatggcggtcatcgggccggggatctattcgacttaacggtcaggaaggcgtacaagggaactcacggtaacgaattacgtcgaagccagcaggatcagttttttatgtatctgcgggtttatattaccggcaaacttgttccttatacggctcgtcgttttattgatcatttgccggctgtttttgagggctcatttaatcaagcgctacttgaagataagagcgaggagcatcggttacttaggacattgaaaaacattgcttgtaagagagtgtttaatcatccagagattgaaaaattagagttacaggggtacagaatcatcaatggactattggatttttactacccattattgaaaatgccccgtcaggattttgtggaactgaatcagaacaatttccacaaagattattttatggaaacccggctgctacacaaactttccaccaagcatcgtctggcttatggtgaagcagtagagaaaattgttgccactgatcaagctgaaaaagacttgctcgaattctattatcgcgctcgtcttattcaggattacatcagtggcatgacagataattatgtttatgaggagtatcgcaaatttattgtgtgcacttaatgttctagaatgttctagccgcgactcaatatcttttgggcggcggtaaggacatgatcaatttcatctgtcagttccaacaattcaggttctatatcggttaattggacaccttgttgtaattgttgttcaattaattggcagagagctttaagttgtggcacgccgctataacagcagctaccgtgtagtttatggatctgctgctggtaattttccaccgtttcccctgacaaaactttttctgtgattgttttaatggttggcagtaaatctaccaacatttgcaacatatctatagccaacggttcttttccggtggcctgttgtagtgctaatggccagttaatatgttgtgattttggtgttttaacgtagcgatctaacacgactctcagacgatgttcatcgagaggtttggtcaggaaatcctcaaatggagagtgtgtatcgctctttggtcggcaggtataagctgtaactgcaatgatcggtgtactgtagtgttgcggtagctggtggatgtggttggaagtacagatgccatccatacctggcatatgaatatccatcagaataagatcaaaatggtgagaggctgctgactgtaaagcttcttctccactgttacatagcacggttttttccacgatttcgtctagtaatgaacctattagtttgaggttagctggattatcgtcaacggccatgactgtcatcggtaaacgtgggggatggataagcgtcttttgtggtacaactgagccggttagaatgaaatcgtcttttcctagccataaatcaaaacggaaaacagaaccttttttcggctcactggtaaagctgatatttccgcccatttcttggattagtttccgtgtaatgaccagaccgaggccggtaccgccataatggcgggaaatactggcatttgcttgatgaaaagcctgaaatagatgaggttgctgttcaggactgataccaatacctgtatcgctgaccgtaatctctaaattgattttatggtgtttctgttgtagcagattgatctttatctccacagaaccttggtcggtgaatttaatcgcgttaccgataatattggtgaatatttgctgtaggcgtgtagggtcgcctacgaccagattcggtatttggggatcaacatggtgagttagctgaatattcttacttttggcgctgagtgtcagtaataccatgacctcatcaatcgtatcttgtagaaggaatggaacgttttccaataccaatttatccgcttcaagccgcgaaaaatccaatatatcattgataatgttcagtagatgattagcagagcgctcgataatatacagatattcagtttgctgtattgttaaaggtgttttcagtgtttggcgggtaaagccaatgacgccattaagtggtgtgcgtaattcatgagacatatttgccagaaattccgtttttattctggccgcatcctgcgcacgttttttcgctattgccagttcaacgttctgaatttcgaattgttccattgtttcccgcagatctgacgttgcttgatcaatatcattttgcatctcttctttatagctggagagcgattttgccattgcattaatgccatttttcagcatatctaattcaccaaaatatttcccactgacacggctgtttaattgcccttggcgaattctatcgacagtactgacgatatcgctgataggttttgtgattttacgaaccaaatggtaggcgaacagcgatgcccagccaaggcaaatgagtaagagtaatataaaaataacgatctctttatattgctgtaagtgagctgaccgtaaatcaagatcaatggcaatatagccaatcggacgtaaagatggggtgtcagaatgcggctgattttgggacagatggtgttctgaaataatgggcatacgtaaaataatactgtttttaacctccgtttttgtcagggtggttggcagaggcatatctggcgagatctgtagttgcgctgaattgtatttatagtttgagatatcaaatagctgattatcatcgttaaaaatggcaatcgcccgaactatctcagaatttctgcgatgaagccgggtgatcaatgaattgacgctttcacggttatgcaggttgatgccaatttcactggcgatcgacaggggttcaataatactgatcccggatcgaacaatttggttctccagttcacgatagtgataacagagaaatgagatactgaaaaacatgccaaccagtaaaattggcactaggatcaggctcatcatgcggatgcgtaagctatatttggtcataatcgtccattatgggaaaataagaacttaataattcatagtccgtaagaatcatggtgcaattttattcccccaatcgtcgaacggtaaatcgacatatcatcacagttaccgctgataatctggatgcccaggggcagggcgtagctcgccatcagggtaaaactatttttgtcgccgggttattgcccggtgaacaggcacaggtacaactaacggaagagaagcgacagtttgcaaaagcaaagttggttaagcgtttatctgacagtccatatcgtgtgaatccccgttgtcctcattttggagtatgtggcggttgtcagcaacaacatgttgcaccggatttacaacgtgaaagtaaagccagcgttctcgaacacctgattaggcgagaaactggtgtaacggtttctgccaaaccggtgattcttggccctgaatatggttatcggcgccgggcaaggcttggtttacattatcaaataaaacagcgccaactggtgataggatttcgtcaaaatcaatccaatgaattagttgctataaaagagtgcccggttttgcgacctgaattggaacagttattacagccattatctcagtgtctgaatagtttgaaagcggttaaacggttggggcatgtggagttggtgctagcagataatggcccattgatgatattgcgccatcttgatcccttgaagcgggaagataaagagaaactaggcacattttccgtgcaacataatgtcgctgtctatctggcggcggatgaaacttcacttgaatcactgaatgaactgccggaaccttggtatcaggtagatgggctgaaactggttttcagtccaagagattttattcaggttaacgatcaggtgaatcaacaaatggttgctcaggcgatagagtggctcgatttgcaaccgaatgataacgtgcttgatctattctgtggaatggggaattttaccttacctattggtcgcatagtgcaatctgtagtcggagtcgaaggggttgccacgttggtggctaatgggcaatataatgccaaaataaataatttggataacatatctttctgccatgaaaacctggaagctgacatacatcatcaaccttgggctaaactggggtttaacaaggttttattagatccggcgcgtgctggggcggtaggagtcatgtcacacattgttgagctggtgccagagaaagtagtctacgtctcttgtaatccaacaacattggcgcgggacagtaagattctgcttgaggctggctatcaaattatcagtgtgcggatgctggatatgtttccgcatacaggtcatctggagtcaatggcgctatttagtcgttagatcgtggttgggtagaagttatgaagtagtcgggagagattatggttgcggtaagaagtgctcatttaacccctgcgggagagtttgcagtaaacaggtggatcgcgagtttaaatatagccaatcttcaattgggtgagaaattagccgaaacctggcgttattgtcacgaaaaagcgcaaaatcatcctgattcagaacttctgttatggcgtggtgtagagatggttgagatcctctccacgttaagtatggatagcgacagtatgcgtgcggcgttactgttcccgttaatggatgccaaattactcggtgatgaaaccgttaccgaggcgtttggcagcgcgattaccaatctggtgaaaggtgttatggaaatggatgccattcgccagttaaaagccactcatcacgattcaatctgctctgtacaggttgataatgttcgccggatgctactggcaatggtggaagattttcgttgtgtcattatcaaattggcagagcggattgcccatttgcgggaagttaaagaggcgactgaagatgagcgtgtactggctgcgaaagagtgttccaacatttatgcgccgctcgctaaccgattaggtattggtcaacttaaatgggaacttgaggattactgcttccgttatctccatcctgatgaatataaaaaaattgcgaaattactgcatgaacgccgaattgatcgtgagcagtacattgattactttgtcaatacattacgcaagcatatgctcaaggagggcgtcactactgaaatatacgggcgtcctaaacatatctacagcatttggcgcaaaatgcagaaaaaatcactggcatttgatgaactgtttgatgttcgggctgtgcggattgtggttgaacgtttgcaagattgttatgcggctttggggatagtacatactcactatcgtcatttgcccgatgaattcgatgattatgttgctaacccgaagccgaatggctatcaatccattcatactgtggtacttgggccgggtggtaagacattggaaatccagatccgtactcgtcagatgcatgaagatgcagaattgggaatagctgcccactggaaatataaagagggggctgcggcgggtagtcgtgtcggatatgaagggcgcattgcatggctacgtaaactgatcgcatggcaggaagagatggctgattctggtgagatgctggatgaagttcgcagtcaggtgtttgatgatcgggtatatgtatttacaccgaaaggcgatgttgttgatctccctaccggttccacgccgctggattttgcttaccatattcacagtgatgtggggcatcgttgtattggggcgaaaatcagtggtcgcattgtgccattcagctatcaattgcaaatgggcgatcagattgaaatcatcacacagaaacacccgaacccaagtcgtgattggttaaatccaaacttgggatatgtcaccacaagccgcggtcgggcgaaaatccacaactggttccgcaaacaggatcgggataaaaacattatcgccggtcgtcagatgctggataacgaactggagcacttggatatcagcctaaaagaggcggaaaagctgctgattgcccgttataacgtccatacacttgatgaagtactggcgggaattggggttggtgatatccgtattaaccagttggtcaatttcttacaaagcaaacttaagaaaaccaccgcagaggatgcagatcgggaagcgcttcgcaatttagagagtaaatcacatccacagcgtagttctgctaaagatgatgggcggattgtggtagaaggtgtgggtaatttgatgcatcacattgcccgttgctgccagcccattcccggcgatgagattgtcggctttatcactcgtggccgagggatctctatccactgggttgattgtgaacaactggccgagttgcaggcaaatgcgccggaaagggtggtggatgcggtttggggagagagctattccagtggttactcactgattgtgcgtgttgttgcgaatgatcgcagtggattattgcgtgatatcaccacgattctggcgaatgagaaggtgaacgtgcttggggtgagtagccgcagcgatgtaaaacagcagattgctaccatcgatatgaatattgagatttataacctgcaagtactggggcggattttggcgaaaatcaatcagttaccggatgttattgaagctaaacgtcttcatggcaactgatcgcgggaaaatttggatactgtgactggggtgagcgagtgcagccaacaaagaggcaacttgaaagatgacgggtataaaacggttactggggattatggcacagttgcgccatcctcagcagggatgtccttgggacaaagagcagacattcaaaacgattgcaccttatacgctagaagagacttatgaagtcattgatgccattgagcgcggtgatttttctgatctgaaagaagagctgggtgatctgttatttcaggtagtgttctatgctgaaatgggcaaagagcaacagttgtttgattttgatgatatctgtaatgcgattagcgataagctggaacgccgccatccacatattttcggtcagcagcaggatatcagcagtgatgtggctatcagtggttgggaaaaacgtaaggcgcaggaaagagcgcaaaaagatctacattcggtccttgatgacattccggcaagtctgccggcattgatgaaagcgtataaaatacagaaacgttgtgctgcggttggttttgactgggatactttggggccggtgttagacaaagtttatgaagagatcgacgaagtgatggatgaggctcatcaggcggtggttgatcaacagcatttggaggaagagattggtgatttattgtttgctgttgtgaacttatcccgtcatcttggatacaagccggaaattgcattgcaaaaagcatgtaataagtttgagaaccgatttagagaaatagaaaagctgattttgaagcaaggtcacaccttggaagcggcgacattggaagaaatggaaaaaatgtggcaacaggttaagaagcaataaccgcaaagctgagattttcaattgcttacagtagggcgatttttcttaaataaactaacctgatgaatttaaataataattaggggagtttcttggctaaagtatggtggaaaataccttatttgcgttcagattatttgtggcaaatttaaggttcgggtatactgctttcccgtcctagttatatccatcatctttaaacctaaactttcaggttcagcatgaaaactaattatatttttgtgaccggcggggtcgtatcctctctgggtaaaggcattgccgcagcctctttggcggctatactcgaagcccgtggactcaatgtcacgattatgaaactggacccgtacatcaatgtcgatccaggtacgatgagcccaatccaacatggggaggtcttcgttaccgaagacggcgctgaaactgatctcgatttaggtcactatgagcgtttcatccgcactaaaatgactcgtcgcaataacttcactacggggcgagtttattccgaagttttgcgtaaagagcgccgtggtgactatctgggggcgacggttcaagttattcctcacatcaccaatgaaattaaagatcgcatcatcagtggtggagaaggtcatgacgtggtgctggtggaagtcggtggtactgtcggtgatatcgaatcgctgccattccttgaagctattcgtcaaatggcggtagaagttggccgtgaacacactttatatttgcatttgacactggtgccttatctggcagcggctggcgaagttaaaactaagccgactcagcactcggtaaaagaactgctctctatcggtattcaaccggatattctgatttgtcgttcagatcgcgttatccctgctaacgaacgtgcaaaaattgcccttttctgtaatgtgccagaaaaagcggttatctccctaaaagatgttgattccatttataaaatcccagggctattgaaatctcaaggcttagatgattatatttgtaaacgattcagccttgattgcccggaagcaaatttatccgaatgggagcaggtcatttacgaagaagcgaatccttccggtgaagtcactattgggatggtgggtaaatacgttgaactgcctgatgcgtacaaatccgtgattgaggcattgaagcacggtgggttgaaaaatcgcttgacggttaacatcaaactgcttgattcccaggatgttgaaactcgtggcgttgaattattgaagggactggatgcgattctggttcctggtggtttcggtggccgcggtgtggaaggcaaaatcatgacagcccgttatgcgcgtgagaacaacattccttatctgggaatctgtctcggcatgcaggtagcattgattgagttttctcgtcatgttgcgggcttggaaaaagccagctcaacagaatttgaacctgattgccggttgccggttgttggtctgatcaccgaatggcgtgatgaagacggtaatttagaagtgcgtagcgaagagagtgatcttggtggaacgatgcgtgtgggcgggcagccatgccacctgacaaaagatagcttggtgcgcactttgtatggagcagatacgattgttgagcgtcatcggcatcgttatgaagtgaataatttactactgaaacgtattgaagatgcgggtctgcgggtagcgggtcgttcagtagacaataaattagtcgaaattattgagatccctgaccatccttggttcgtggcttgtcagttccacccagaatttacttccactcctcgtgatggccatccgttgtttactggttttgttaaagccgccggtaaataccagaaaggccagctcaaataagatgtgcagtgagtgacggtatgaagtgtttccgtcactcacctgaaatgtaacttgtactgaggaaaacctaatgtccaaaatcgttaaagtgatcggtcgtgaaatcattgactcccgtggtaacccaactgtagaagcagaagtgcatctggaagggggctttgtgggtttagcggctgcaccctctggtgcatctaccggttctcgcgaagcgttggaactgcgtgacggtgacaaatcccgttttatgggtaaaggtgtattgaaagctgttgatgcagtaaatggcccgattgcacaggcagttatcggccaggatgcgaaagatcaggctaacatcgacaaaatcatgatcgacctggatggtactgaaaataaatctcaattcggtgctaatgcgattctggcggtttctctggctaatgcgaaagccgcagcagcagcgaaaggtatgccgttgtacgagcacattgctgaattgaatggcactccgggtaaattctctatgccgttgccgatgatgaacatcatcaatggtggtgagcacgcggataacaacgttgatatccaggaatttatgattcaaccgattggagcaaaaacgctgaaagaggcggttcgtatcggttctgaagttttccataacttggctaaagttctgaaagcaaaaggcatgagtactgcggttggtgacgaaggtggttatgcgcctaacttggaatctaacgctgctgcgctggctgctattaaagaagcggtagaacaagcaggctatgttctgggcaaagatgtcactttggctatggattgtgctgcttctgaattctacaacccagaaaccggtaattacgaactgaaaggtgaaggtaaaactttcacttctcaagagttcactcattacctcgaagatttgaccagaaaatatccgattgtttctattgaagatggcttgaatgaatctgactgggaaggcttcgcttaccagacaaaagtgctgggcgaaaaaatccagttggttggtgatgacctgtttgttaccaatactaagatcctgaaagaaggtattgagaaaggcattgctaactccattttgattaaattcaaccagattggttctctcactgaaacactggcagcgattaaaatggcaaaagacgcaggttacacggcggtaatttctcatcgttctggtgaaactgaagatgcgactattgctgatctggcagtaggtaccgcggcaggtcaaatcaaaaccggttctatgagtcgctctgatcgcgttgctaaatacaatcagttgatccgtattgaagaagctttgggtaaccgcgctcctttctatggcctgaaagaagtaaaaggtcaggcttaataggtaattaattaagtattagaattaaacaggaggggtaaaaccctccttcatacaggtaatagcctgataacttctacaacgtcaatttttgagttttcctgaggcagtcggtcggtgcagccatgctttcacatatgaaacttttcgccgatggcttaatagcgagaatcccccctttaatgttgctgagaagatttaccttgatataacggattttagttagctgtctcaacaacagttcggacatatccatacttggcaactagagccttgtattggtgtgacagaattacccggtaagctgagagctaaatgatgtccgatggtcggactcagagcctcgactgcaaggtcaaaaagaaaaaaacatttaaacaagacgaagatctattttttaatagaaaagacacgctaacctttagtcagaactcagaactcagaactcagaactcagcttttttatggcaattatacttttgcttgatatcagacatatttatttcataaccggggtcgcaagagaaaaagatatttaacgtacgtgaaattataaagatcgccttattttccattcgttatattggccactctttatagaacttccccgatctaaaaattaatggatttttgcggtcatccttatacgtacgatccatcttggaaaaggatattgatgaaaatgaatcagcgagaaactaacgtaagcatattggcagggaattcacgagtttatctcaataaggatagcgagatagttgtcgaggctcagttgaaagcctttgaggctgctctgatgttcgccaaacgaagccaagatgaatgtggtcaattaccgaggatatccgtggcgttcgatcatcatgggatattccgcctccagttcctgataaataatctcactaattctcaaaaacggaaccctcgtctgagtcatctccacgcctcgatcaggaatatcttcttgcccgtagcagaaaaatatcagattccgctcagtgagatacgtgttattcacgaagattcagccaggcagcaccttgtccacatcctagcctctggagaaatacccgaaatcatcacacggcggatggtgtccaaaaacctcgctgacggcaaaccaccgacatcagatgctgcttacgaagagccgactcagaaactcacctgtgcagcaattacgaaggagtattttgagaaagctgccggtgatcacaaaggctcagatactattctggaggtgttctttgaggattgcgcttggtcgagagctttggcctatgtgcgtgggctgcaactcagtcatatgctcggtgtttcaaccgccattcgtcttaatcttgttaatgaagagggggaggtgagtcaaggtgatgtaattactgcctagcagatatatacccgttatctttcaggttgcctctttgttggctgcattcactctggttacatagttctctatgctcccggggattcgtttccttgccgccgcgatgcatcttgaaatccatagggtatagatatagtcaagataataaaaaaataatttcatcttcgtttgttagtggggaaaataaattatgtacaacttaacccggccgatatatttggataacaatgctacaacgccattagatcccgacgtgcttcaaactatgatgccctattttaccagcgcttatggaaatgctgccagtaatcaccatgcatttgggtggaaagctatggaagctgttgataatgcaagaaaattgatatcaacatcgataaatgcgacgagtcattccgatattatattcacgtcgggttctaccgaatcgaacaatcttgcaatcgcgggccttcaacatcggggcaaaagggggcatgtcatcacatcgacaattgagcataaggctgtccttgattgttgtagtaggctcgaagcaatgggaacggaggtgacctatttaccgccgcaaagcgacggcatcgtatccccagatttaatatctcgtgcaataagagatgatacctatctcgtttcgattatggccgccaacaacgagattggttcaatacaaaaaattgaagagataggcgcgatctgtaaggaacatgacattcctcttcataccgacgccacgcaagcgctcggcaaaataaaatttgatgtacagcgcatgaatatcagccttgcctcattttctgcgcacaaaatatatggaccaaagggggtcggtgcactttatatcgattcacgtaataagaatataacactcgctcctctcatcgttggtgggggacatgagcgaggcttacgctctggaactcttaacgtcccggggatagtaggcttcgggcgggccgtcgaactgtcggttaaaaacttgcctgatgagtcgatgaggttacgttatttacgggatttgcttcgttcgtatattatcgagaatgtggctgacgttcggataaacggtcatcttaccgaatgccttcccggtctgttaaatgtctccttcaacggtttggatgctgattcgcttttgctggagctttccgaagttgcgttgtcctctgggtctgcatgcacatccgctaacagggcaccgtcacatgtactgaaggcaatcggcgtcagtgatacacaggctcaagccagtgtgcgcttcgggttaggaagatttaataatgaagacgagatacgctatgtttgtctccgtctggaaaaagcggtgaataaactgaggtcgatggtgccaaagccattcggcgtcctgtaataattaagatggagtttgacttatgcgaacaatgtcggcactttttctcctgttcggaaccctgttcactgcggggggatatggtgccacctttcttatttccgcgtattttcgctcacaaggggggagtgacattgacactgggacgacccttagcgtggccttggtcggcactttgattggcgttcctttggttggatggtttgccgggcaactggaagcatcacgccttgcagccctcgcggcgctggcgatgtcttgtggttattttcttttagggggtttcagcggtgaactgagttacatcccgcgtatcgcagcatttttgattggactcggttggggaatgttctatatcagtgggcctatggcgttgtcagagcgtgtcactgatgctgacaggggccactggtttacccgtttcagcgcgtttcaaatggctggaatttgcggcagtcccatcctcctcgccgccgcggttgaacaggcaggagtgcccatacaaacaacgtttctctttgttggcgtcattggcatcctcgcctcactacttctggcgacctttgggatcagggaaccgcatggtcaacgggagttatcactgagaccttgggtgagaaaaataaccaagattgctgccagcagtgcgatccgtcctattgtgatggtaggtctgggaggctgcgtattctctggaatgatgtcgttccaaagttcgttggttgaagggactcaagcaaatgcaagtacattctttgctgtacatgcagcgactgtggttgtgtcgcggcttttgttagcccggcgtttatcgatgatgccccgtatcccattggtcatcgcgctgatgttattcttaatcatgggcattctggccctgttaggcataccagttaaccccatgttccaggttttggcggccatgttaacgggaataggctatggattggtgtatcccgttattcaaacatgggcagtaaacgattctgcgcttgagaatcgtcacgctgccctcacttggttcgttgtcgcctactttgtggggatatttggatttcctgcaataggtggatggatattagtgggtgcgggcaagaccttgtttatcctcactctagctgcaatagcttctcttgaacttggggtggcgttattgggagggagatggttttgccgcattaaggataggttaacggcacagaatgaagcacgttaacagtcattcagccagtcgataattatcgactggctgatttgccgttgcacaagtcatttttcgatggacataaagtatttaatgggtgttattcctcgtaattgaagcgcttttttagggcattcattaatgtatttaatgcagcttccaacatttcccaaaataactaaactttttaaatattcgagtattcataaaagaacatttattaacgattaaaattcatttatgacttttaatcgttagatataatattttcttattcggagaatatttggctgtacttagcgggatttaacgttttagtacagttattttttagtattccgcaccagtgcggactcaggggaaaagctgtaacaatatataccctatggatttcaagatacatcgcgacggcaagggagcgaatccccgggagcatagataactatgtgaccggggtgagcgagtgcagccaacaaagaggcaacttgaaagataacgggtataaaaatataaatttgaagaaagtatgaatatagcaccttgaataaccaaactgaaaggagaataaggaatgattgtaaaaaacgactggcacccggctgatattattgcagggcttaaaaaacggggaacgtcgttagctgctgtttcaagggatgcggggcttgcatcatccactttatcaaatgctttgcatcgtccgtggcctaaaggtgagaaactcattgctaccgctctaaattgtgagccttttgaaatatggccaagcagatattcaaaatgaaataaaataaacttctcgaaaaaaagtcaatgagaagagattaagtatctgaaacttttctagtgttttgtggaaagtttcaggtatgattaaaatggagtgattaactccttgccttgatgtttgtcataattaatttttctgtataaattatttaatcttttgtactgtgctgacattcctctctatatttctgttgatttcgcggatcgccagataggcgtaatattacaaaagcgggtaaaccaaaaatttttttggaagtgggtaggattctgcttggcagaaccctaatggaacagtgacggagtggttcattgttatgctagagttatatagggattcgggttaataaatcgggtaggagcatagttatcataccccttacctctgcaatattcttttaactggcttaatgaatttatccctattttttggtaaataaattgtaacctactttgtaccgttctataggtaatacctaattttctcgctatgtctttagcgcttagcgattgcaatgcaaaaaatactatatcgaactctctgtcggtaaataaatcagttggtttgccaaaagttaatgactctggatgaatgttattttcaaaatgatacatggagtaaatttcaagttttttgccgtgtccaacaatgccaatgcattctccatccttcattagcggtgtaacattggtcagaaatggttggatcattttttgtttcccaccataagtcaaggtgtttaatactggaatggttttttgactcgtcattacaacatcacaactcgcttgtataatattttcaaactcagaccacggtgctggacactcaccatcaagcctcccttctatgctaaaacccttaggaagaccgctgtaataaagcatagtatcattggcatagacgaatcgatgttccctgtcttttatagcccaaaaatcgttgctgttttccatatatgatataaaggcgtcaaagctttttgaatgaacatccaaatctttgtttacagagaaactcatcgtgttatctttcataatttcacctatcataattgaactgtaaaactgtgataacctccatgtgaggtatcccgtaaaatcacccttcgcgctgctgagtgagttttggccggagcataaggttctgcttggcagaaccctaatggcatagtgataataacgatgtggttcattgttatgccagaggtataaagggattagggttaataaatcgggtaggagcgtagttatcatatcccttacccctgcaatattcttttaactggcttaatgaatttatccctattttctggtaaatgacatgtagcctgctttgtaccgttctataggtaatacttaattttctggcaatatctttagcgcttaatgattgcaaagcaaaaaatactatatcgaattctctatctgtaaaaatctcagttgggttgccaaatgataatgattcaggatgcctgttgttttcaaaatgatacatggaataaatttcaagttttctaccgtgccccacaaccccaatacattctccatccttcattagtggtgtaacatcgaccaaaaatggttggattattttttctctcccgccgtaagtgaaggtgtttaataccggaatggtcttttgagtcgtcattacattgccatcactagcatgtacaatatcttcaagctcagaccacggagctggacactcactaacaagcctcccttctatgctaaaacccttaggaagaccgctgtaataaagcataatatcattggcatagacgaatcgatgttcgttgtcttttatagcccaaaaatcgttgctgttttccatatatgatataaaggcgtcaaagctttttgaatgaacatccaaatctttgtttacagagaaactcatcgtgttatctttcataatttcacctatatgattaaatggtaaaactggaataacttctatgtaaggttatcacttttacgacacaatggataattatgtttatcagtttcaaaaggggactctctttggtgtggacgattttacaaaggagcagtttcctgtaatcatcttcaatatgctaatattctatattgtgtgaaatttttattagtaattatgtttttaatgaataattgcaatatgaaatatgctggatggagtgtgagagaaacaaggtgtaaggttctgccaagcagaaccctaatagcatagtgacgataacggtgtggttcattgttatactagaggtatatagggattcgtgttaataaatcgggtaggagcgtagttatcataccccttacccctgcaatattcttttaactggcttaatgaatttatccctattttctgataaatgatatgtagcctgctttgtaccgttctataggtaatacttaattttctggcaatatctttagcgcttagcgattgtaatgcaaaaaatactatatcgaactctctatcagtaaataaatcagttggtttgccaaaagttaatgagtcaggctgaatgttgttttcaaaatgatacatggaataaatttcaagttttttaccgtgaccaacaaccccaatgcatttcccatccttcattaggggggtaacattgagcataaatggttggatcattttttgtttcccaccataagtcaaggtgtttaatactggaatggttttttgactcgtcattacaacatcacaactagcttgtataatattttcaaactcagaccacggtgctggacactcaccatcaagcctcccttctatattaaaacctttaggaaggccgctgtaataaatcattgtatcattggcatagatgaatcgatgttcgttgtcttttatagcccaaatatcattgctgttttccatatatgatataaaggcgtcaaagctttttgaatgaacatccagatccttgtttacagagaaactcatcgtattatctttcataatttcacctatatgattaaattgtaaaaactcccatgtaaaattatcacttttacaacacaatggataattatatttatgagttttgggcacctatttggtgcggatgattttacagaggagcagtttctataattaccttcaatatgctaatattctatattgtgtaaaatttttattagtaattatgttcttaatgaataattgcaatgtgctggatggaatgtgagagaaacaaggcttaaggttctgccaagcagaaccctaatagcatagtgatgataacggtgtggttcattgttatgccagaggtatatagggattagggttaataaatcgggtaggagcgtagttatcatatcccttacccctgcaatattcttttaactggcttaatgaatttatccctattttctgataaatgatatgtagcctgctttgtaccgttctataggtaatacttaattttctggcaatatctttagcgcttagcgattgtaatgcaaaaaatactatatcgaactctctatcagtaaataaatcagttggtttgccaaaagttaatgaatcagggtgaatgttgttttcaaaatggtacatggaataaatttcaagttttttaccgtgcccaacaatgccaatgcatttcccatccttcattagcggtgtaatatcgaccaggaatggttggattattttttctctcccaccataaatgaaggtatttagtaccggaatggttttttgactcgtcattacgtttttatcattagcttgtataacatctacaaaatcaacccacggtcctggacattcaatatcaagtcttccttctatattgaacccctttgggagaccactgtaataaagtgtagcatcattagcatacacgaatcgagattcgctatcttttatgatccaaaaatcgttgctgttttccatatatgatatgaaagcatcaaagctttttgaatgaacatccagatctttatttacagagaaactcatagtgttatctttcataatttcacctatatgattaaacggtaaaactggaataatctccatgtaaggttatcacttttgcgacacaatggataattatatttatgagtttttgggcacctatttggtgcggatgattttacagaggagcagtttcctgtaatcaccttcaatatgctaatattctatattgtgtaaaatttttattagtaattatgtttttaatgagtaattgcaatatgaaatatgctggatggaatgtgagagaaacaaggcttaaggttctgccaagcagaaccctaatagcatagtgatgataatggtgtggttcattgttatgccagaggtatatagggattagggttaataaatcgggtaggagcataattatcgtaccccttatctctgcaatattcctttaactggcttaatgaatttatccctattttttgataaataaattgtaacctgctttgtactgttctataggtaatacttaattttctcgctatatctttagcactgagtgattgcaacgcaaaaaatactatatcgaactctctgtcggtaaataaatcagttggtgtgccaaaagttaatgagtcagggtgcctgttgttttcaaaatggtacatggaataaatttcaagttttttaccgtgtcctacaacgccaatacattttccatcctttattagcggtgtaagatcagctagaaacggctggatcattttttctttccctccataaatgaaggtgtttagtaccgggatggttttttgactcgtcattacgtttttatcgttagcttgtataatatctgcaacctcagaccacggagctggacattcactatcaagcctcccttctatgttaaaacccttaggaagatcgctgtaatagagtgcaacatcattagcatagacgaatcgagattcactatcttttataatccaaagatcgttgctgttttccatgtatgatataaaagcatcaaagctttttgaatgaacatccagatctttgtttacagagaaactcatcgttttatctttcataatttcacctatcatgattaaactgtaaaactgtgataacttccatgtgaggtatcccacataactgctttttgcgctgttaagcgcgttttggttggagcataaggttctgttagacagaaccctaatggcatatacccgtcatctttcaagttgcttctttgttggctgcactccctcaccccggtcacatagttatctatgctcccggggattcgctcccttgccgtcgcgatgcatcttgaaatccatagggtatagtgataataacgatgtggttcattgttatgccagaggtatatagggattcgtgttaataaatcgggtaggagcataattatcgtaccccttatctctgcaatattcctttaactggcttaatgaatttatccctattttttgataaataaattgtaacttgctttgtaccgttctataggtaatacttaattttctcactatatctttagcactgagtgattgcaacgcaaaaaatactatatcgaactctctatctgtaaaaatctcagttggattgccaaatgataatgattcaggaggtttattaatttccatatgatacattgaaaaaatttctagctttttagctctgcctactacgccaatcgactctccatcttttatcaaaggcgtgacgtccgccataaatggttgaataattttatccctaccgccatacataaatgtaatcaaagtaggaatgacttttttttcctccatcactctacgatcattagattgaataatatcagcaatctcagaccaataaaccgggcattcactatccagtttaccttcaacattaaaccctttgggtagtccgctatgatgaagtccgtaatcattcatatagataaatctcgattccttatcttttatataccagaactcattacagttttccatatacgatatgaaggcatcaaagctttttgaatgaacatccagatctttatttacagagaaactcatcgtgttatctttcataatttcacctatcatgattgaactgtaaaaccgtgataacgttcatgtgaggtatcccacaaaactgcttttcgctttgttaagcgagtttcggtcggcgcataggattctgtttagacagaatcctaatggtatagtaacgacagcaatgctgtgcattgttatgccagaggtatatagggattagggttaataaatcgggtaggagcatagttatcataccccttacccctgcaatattcttttaactggcttaatgaatttatccctattttttggtaaataaattgtaacctactttgtactgttctataggtaatacctaattttctagctatgtctttagcgcttaatgactgcaaagcaaaaaatactatatcgaactctctgtcggtaaataaatcagttggtttgccaacagttaatgactcgggatgaatgttgttttcaaaatgatacatggaataaatttgaagttttttaccgtgcgacacaatcccaatgcattctccatccttcattagcggtgtaacattgaccagaaatggttggattattttttcttttccgacataagtgaaggtgtgtagtaccggaatggtcttttgactcgtcattacattgttatcgttagcttgtataatattttcaaactcagaccacggtgctggacattcaccatcaagcctcccttctatgttaaaatccttaggaagaccgctgtaatgaatcatagtatcattggcatagatgaatcgatgttccttgtcttttattacccaaacatcattgctgttttccatgtatgagatgaaagtgtcaaagctttttgaataaacatccagatctttatttacagagaaactcatagtgtcatctttcataatttcacctatcatgattgaactgtaaaactgtgataacctccatgtgaggtatcccgtaaaatcccccttcgcgttgctgagcgagttttgggcggagcataaggttctgcttggcagaaccctaatgacatagtaatgacagtgatgttacgcattgttataccagaggtatatagggattagggttaataaatcgggtaggagcgtagttatcatatcccttacccctgcaatattcttttaactggcttaatgaatttatccctattttttgataaatgatatgtagcctgctttgtaccgttctataggtaatacttaattttctggcaatatctttagcgcttagcgattgcaacgcaaaaaatactatatcgaactctctatcagtaaataaatcagttggtttgccaaaagttaatgactctggatgaatgttattttcaaaatgatacatggagtaaatttcaagttttttgccgtgtccaacaatgccaatgcatgtcccatccttcattagcggtgtaatatcgaccatgaatggctggattattttttgtctcccgccataagtgaaagtgtttagtaccggaatggttttttgactcgtcattacgtttttatcattagcttgtataacatcttcaaactcagcccacggtgctggacattcactatcaagcttgccttctatgttaaaacccttagggaggccgctgtaataaagcataatatcattcgcatagacgaatcgagattcgttgtcttttatgatccaaaagtcgttgctgttttccatgtatgaaatgaaggcgtcaaagctttttgaatgaacatccagatctttatttacagagaaactcataattttatctttcataatttcacctatcatgattaaactgtaaaactgtaaaactgtaaaactgtaaaactgtaaaactgtaaaactgtaaaactgtaaaactgtaaaactgtaaaactgtaaaactgtaaaactgtaaaactgtaaaactgtaaaactgtaaaactgtaaaactgtaaaaacttcgatgtaaggttatcacttttacgacgcaatgagtaattatgtttttaatgaagaattacaatatggaatgtgaaaaaattcgctgttcatgtaattggtttaattaagtgtgaaaatctgacgtgtgtattgattttcgctcttgtttataaccgagcagtaaaataattttatagctcgtggtcctattctcttaggttaaataatgtggatgatcgcttttagtgccatttgaaagataacgggtatagacagcattaatctaataacagaagtaaaagcatttaacagggttaacccgattagctgcgaaaaaaggaataaaaaagtttatttaattacattaaaaatgattaaaggaatgaggggtgttttaaaatcattagcatacctgttaccctctttagttttaaatctaaaaatataagaaggaaaaactaagtgtcagtttaatgaaaacggttaaattaaatattattcaggaaacgaaaaagaccattgggctttaaaaagcggttaaaactttgtacgattaaaaccagaaatttaaatagtggcttttaataacagtttaaaacctaccatcataaagctatcagtgaaaaatgaaaaaaatggccttgttaatgtttaaatacccgttaagcctataacctttctggtaagttaattcgccagatttttaaccatcgttgatgctaaaacaccctctcgtttttttaactgcttttgtgcccaaaaaagctgcataaaacgtaatgatttcctataactataaaggtgtaataatgtgatgtaacaacgagaatttgtataatataccgtcttttatgatttaattgattagttattgcgctttagatctcaaaatttaaagaatggcatttgattcccagagaagactccttatattcacacgccttgtatttttttaacaattgtagcaatggtggatcagatatcaccggcgctaatggagtcaccatggatgtttctgaatctttaaccacagctataaggccaaatttttcgaataaaaaaggcttaattattctggctgctgatattgcgctactacttattctacttaatacgttaccgtttggtgaaaaagctaatgcaggtttagcactaatgatatttgttggtgtgctgtggcttactgaagctattcacgtcacgattactgcattatgtattccaattctggcagttggtatggggttaatgaatacgggagatgcgctgaaatcttttgctaatcccattatcttcctgttttttggtggctttgctctggcaacggcccttcacatccaaggattggacagactgatagctaaccgtctgttgatgattgcccgtggacgtttatctgtagcggtgatgttgttgtttggtgtgacggctggcctttccatgtggatcagtaacacagcgactgccgcgatgatgctgccattagtattgggtattttgtctaatctggatgcacgttctgagcgccatacgtttgtatttgtgctgttgggtgtggcttatagtgcaagtatcggtggcttaggtactttggtggggagcccaccaaacgcgattgcagcggcgcaattgggtatcgatttcttcaattggatgaagtttggggttccgttggtggttattctgctgccaatgatggtgggtgttatgtatctgatgctgcgcccgaatttgaatcataaattcgacatgaagctagaaaaactggattggactggcaaacgtctgatgaccatgctgatcttcttattaaccgtattttgctggatctttagcacggttatcagctctgccttaggaggtgtgaaagatctggatactattattgctgtcagtgctgctgttctgattggtataacgggggtagcgagttggtcgcagattcaaaataataccgagtggggggtgttgatactgtttggtggtggtctgactttaagcgctattttgaaaaactcaggtgctagtgaaatcatggcgaatggtatggccgcgacttttggcgcaagccactggtttgtgattattgttgcggtagctgcgtttattatcttcctgactgaatttaccagtaatacagccagtgcagcattgctagtaccgatattcgcaaccgttgcggaagcgttggggatgccgataatgacgctgacacttattatcggatttggggcatcctgtgcttttatgttgccggttgccacaccacctaatgcgattgttttcagctccggtcatattaaacagactgaaatggtcagagtgggtatagtgctgaatattgcctgtatcgcgatcatctctctgtttgcttggttattctggttgtaactgaaaatttactcatgtccctctggacacaataactattcaatatccccatcaaatgtacggtggggaaataaagccagagggggaagattcatagagaaggatttgccgagcgcgtcagctagcaatctaatattgtcaatgtaagaccgatgaccaatccgacgaatagcacggccattgctgagcttgaacctcctgcgactaacccgatagtggctaatggcactaagcacaaaatccccagattattgaatgtttctgcaaaggccagaaccatacctttgttagggcctgctcgtgttgccaaaacgacggtacttgcaggcgctccaacgcccagcgcggcaccccagaatattaaacatcctagagaacctaggagcgtaagcggaaccagcataaaaactgagatcacaccagtcagtagcaaactgaccaaaactaaaatcacttcttctcgatcgcaaagcttacgaagccaaccaacggacagattacctaaccctaagccaacaccaaaggttgcaacagtcagaccgatttcagtggggccaaatccgtaccgttgacgtaagacttctccagacaaaagaaaagcagagacgccggtgccattccacgccccttttgcaatgatcggcctgacaaccgaccattgccgaaaccagactaagcgctggtttgttggctgtagaggcgcagtttttgatggcaggcagtagatcccgatgatgaatgtaacgacactgccaagtgagctaaataaaaacggcgcttgccaatttattaaatctgtcaatatcccggctaaagctggaccgaatgcaatgccaaaagtcataccgagcataacgatacccatcgctccggcttggcgattatagggaatgatatcggcgatcaaggcaaatacggtgggtatgattaccgctgatgctataccgccaaaaattcgcagcgtgattgcgatattaagagtgggggcaagagtgatagcgaggccatctgcggcgaaaaacagcagagaaatcataagtaatctgcttctgttaatacgatctgaaaaatacccaaatataggtgctgccagagcgtaagaaaatgcatagctggataccagccaggatgctccgatcgccgttgtcccgaaggcgactgcaagaggggtaagcatggatgacaacatgaattcggttgcgccaacgaagaatacagtgactgaaaggataaataaaaacgtgtattttgtgctttgttccagagtggatgaatattgtgcttttttgttcataagatcgatttaactccatatgtataccctatggatttcaagatgcatcgcgacggcaagggaacgaatccccgggagcataggtaactatgtgaccggggtgagtaagtgcagccaacaaagaggcaacttgaaagatgacgggtatagatagatgttcgtatattttttgcggtaaaacgtgatgagtcagtgacgtagaaaagctattgtgaaatacatataagggggcaggccagattaggcagatgtgaaagtattaaatattacaaaggaaaaaggggaagcgcattagtaatatccgtaataaagaaagcgagcatagaattaatttatcggattaggtatgccggatataagaacggagtttatcccttatgtacattcttttagctacaggaaacctgataaaagtcttccccacattcgggttagatgctttggttaagcttgtattttgcaagagtagatatacagtaaaagtgtatatccaaggaggtaatatcatgcaagtagcaaaatggggtaacagccttgccatacgtctgccagctagcttagttgaaattctggaattgcgtgaaggtgatgatattgagattgtagtggatgatccgcgtaccttcgcagtatgcaagaagcctggatctgaggtgttgttggagcgtcttcgaacattccgcggtaagttgccgacagatttcaagttcagtagagatgaagcgaatggtaggggttaagtcttgcggtttcatcgacatcagtgtgcaggtactcaatgaagtggcgcacgtgtgtgtgcgtaaacttaagatgagttgggaagagatagcggagttcctcgatattgtacgtagtttttgcaaaatcgtgcctcttacggttgaagttcatgaccgagctaggcttattgcagagcgttatcgcttgtcattctacgattcttgtattgtggcggctgcggtcattgcaggttgtcggacgctctatagtgaagacatgaatcacgggcagatgttggaggacagcttggttattaaaaatccattctcatatgtttgacgatttggtgagccagagagggatcggggttcacctgctgatttaacctgacagacaccgatataaaggtatctgtcagctcaaatctgtgttatgaccttgatttattgtgctaagaatatctacaaagcgttattatcatcatacgaccgactaatttcctgaacagcaaattctttaacggattgaactttgatcggacctttgggaccatatttgtagagatcaccagccaggctattgtctaaaaacatcgcataggacattctatcgcgctgtccattacgttctgtgcgaacaacgccatgtatattggcccgaacatttttcgttaaattttctgtcagcacttctatcgagctaccaaagttaattatcaggtgaccaggaacaggatcaatagccaaaagctcatcatctatataagctaatagtccacgttcagttgctcttaggattgttatccatcctatatcccgatgaaatttagatccccgggtagctttctctgatcggtagtgattaaaccctagcatctgatgccctcgtccttccgaaagaccacctgtgactaattcccagtcactacgaggaataccaacatgatttaacactgagcgcaatatacatgtacccatgtgtgccatatgatgacccagtgtcgcgacctcggttggaattaagttccagtgcgctcgttcgatatagagattttcccattgatcatgttttctgtcgaaataaccttcgaaaccgttggaaaaagtacatgatttgaatcccgtatagggacgcagatcaccttctgtaacaggttcaaagaagtggtatgcaagtcgatctccgtattcaaaatctatatggggtggaacttccaggagaaaaaaaccgtgtcggatagctcgatcaaagtcatcttcatcagtaaaaacaagtttgtctccttccaggcgggatcgaaccatgtttgccgatttataagtttctgcggcagttatttcagatggcattaatggtagtttaattggagctcgcattgttgatgaggttttcatgattatggcccttaaataaagtagtaaaaagactttctatgctctcgacttttggattaaattcataaattatttcaccagctttcttttttggaaatttaggaatagctttacaggtgtcagagcaccatttttgccatatcgatagaaatattgatccactcttggtctaatatagatgccaaaattaaatcgaccttcactcaatattaacagtttcttaaaaaaaagatgatattataattatttttcatagctatataagtgacaatttcgtcacatatgcatttacataattaatgtctgttatctatatagttaatatatggcatagaaagaattgaaatgcaaatgactacaatgaaaaatacgatatgttttttatggaaaaaatgttatcacaaaaatctttaaaatcattatcttatattatggtaatttattgatgaaatgtttacggaatttttatttgttctgttgtgattatttattttgattaagataataaatgatttgttttatttaaattattgtttggtaatatctattttatatttgtgtatataaattgagcgttattttttgaatttaaactctgtgggagattaatctgcttgtctattttgataggaaaatttatattatcattatgtttttagtgttaattaattgaatgttttcagttttatgtttttttatcataatcatcctgtacaaaataaatgacgggtattttcattctgttataaattgaattgctactgaaattattcccaattttatgatgatgaaccttcataatcgacctgtaatgggcaacttaaagaaggggggataagagtattaataatataattttgttaaaaaattctttgaagcttatttcaaggattagaattttttcatgtttattaagaatggacgtattgactgatatctttgccgaatcgactattaatgaaaagtgtgtagaaaaacctgtttaccttatcctgttctcccggttttatagagagaagtttattggaaacaggttgttagaaaataaatttaacatgtcaggcgctttcaatagagaagtgatcgataaaacatcattattatcatcgtatacccgctcaagttcctgagtagcaaatgcggttgtcccgaaggcgagtgcaagaggggtaatcatggataacaacatgaattcggttgtgccaacgagaatacggtgactgaaaggataataaaaacgtgtattttgttcatcaagaattctttaataaatgacagaattttacatgatgatcaccgtattgaatacatgaccgaaaaaataataacaataaattcaaatgattatgtcaaatgaatctattggaaagcataccaagtttgatacagattttatcacaaaaagcaacaaataatttacagtcttttcaatgggttatatttttagttgtgatggtgcccacaaatatattaactatcacatggctaaattaaaaaaactgttattattaggatgctgaattaaattttaatccagtttatttgtcaaaaaaatcctagaggaggataaaatgaatgtgataacagcacaagcatttaggccactaactaatgatgaaacattgaattatgataatggtttaatgaattcatctcctaattaatagaaaaaggaataaaggtataccataacctttattcctttatttgtcctttcatttataagataaaaggtaaaacatggacattattaacgtaaaaagggaaataacagtaataataaataaaagatttaatgatactgatctgtatacttgctacttgtcaggttcagtcattgaagggtttgcaacaccaaaatctgattatgatgtctatgttatattggaaggagatctggaaatagaatgcgaagagatatttataccatccgatataggaatgttagaagtgacaataatctctttaaaagagataaaagaaatcatgaagataatcaacaatggaggttcaaattccgattggtataaattacatttgtctcataggatattaacaggggaatcgattataaagtcaaataattttaacaaattgaaaggagacataaataagactaaattatgtgaaatacttaagaccaaagcaaaaaactttggagaaaagtgtttttccgatgggattggaaatattttaaataatgacctaatatcagcagcattcaactttgaacgaacagttaattcagcaatggattatattctggcttcaagtggaaacacatccactttagtaaagtggcgctatcaaaatgcaatgaagatgtttggaaaaggccatccaataacatctatatacttgatgatttgttcaaaatttaatgtaatcaatgatatttcaacaattgattacataaactcagttgctaaaatgtggcaattaactttagactattgtcaaggaaaagatatttttggttacaatgtatcttttgcaaaaaaaagaatagctaatacatccgatattttattatcagataaaaataataaaccaataataaaaaatttatggtatagagtcctgtgcaaggatgggaaattaatacttttcgcaaaaaaagcattatgtgaaattaattcagatgcatataaagtttggttagtaatagataatgaaaaaacagagtttgaagttgtttcagagttggaaaaacttggaataactaatgaaaatgctaatttttatatatcggaattcgaaagactaggggcattaacaaaataatacatatggggaatgcaatggaaagaataaagattataagtaggcaccactgctggagaacattaaagggaactaaaaccaataattttcaagaatatttaaaccaaataaataatggatgccaattacaagaaacaatatttcatctacgcgatgcagaagaaatgttaatggacttaagtaatttgtcatcacctatgtcaagattatcaagcactgaaataatacacatttgggatgaactagttgattatttaaatataaataaacttacctctgatatgggtaacttagtaaatggatatggcttagatccagaattagccttatatggtactgagctatgcgagttaaaaataaatagagaaaaaatcctatccgaaataataaacaaaggaataacaaataaattagaattaatatattcaagagggcttgataagtcagtgaaattaaaggatgctccacaaaaaacaattgatttatatgatgagtttcgttacgaatacagtaaaagtattaatttattttcattggaaacttgccccacattaaacatagaaaacatttaccaagatcattacctgtgggataagatttttacgatagctaaaaacaaactatttattatttcggggggaatccctcttgcgttatcttatcatgcaaaaacactggacaagaatatatacttttgcgaaatacatcgtgaaaatgatagtggtttactgcataaaagaaaattatttaatgaaatatacccaaaatttaaaggaaaagaaaacgaaagttggctgataattgataaatcctatacaggaggcagtattcagttagcttacaagatgcttgtaaatttagttgggtacaaatcgcaaatatataaagtatcattttccccaaaaacgttaggagcattttcatcgtcagattatgcaatttatgcaggcagattatttgatgtaaaaaagacaatagcatatttaacagccgaggattggcataaaaaactcatctatttgggagataatgtcacatgaggtatgtattcagtaatgaagttagcaattatttagaaatacaccttcacaaactcagagaagagattcgtagaatatggcttgctaagctttccactattcatatcggatatgataacaaatatcatggcgaaacagtagaaatagatatcattttaaataatataatttacgagcacttagataaatcagaactcaaggtcactattatttcagaagacgattctgaatcacaatctgtcaatattaaagataaggtttccttactaattgatcctattgatggtactcataacttgcttatgggttatcctgcctatactacatcaatagctgtttacaagaataatagatatattatgggctgggtatatgatattccaagagatattatatataaagcatcattgggagaaggttcttatatacaaagcatatataccagtaagcgaatatatacaagcccctcatttcaactaaacgatttgagagtatcatttcatagggcgagaaataatcagtatacagaggttcagaataaaattattaatgaagcaaataaagtaagaatctcatcttgttcaagtttagatatatgcctgatcgctagtggcgttctacatgcattcttagatttatcacttatgggtcacgaacgttgtgtagatatagcagcagctaaactaatccttgaggagtcagggggatacataatgactcgtgatggaaatagttataatatcctatcacctacagattctttattttttgagaaaaaagcaatcatagctgtttcttctaaaagtgcaggggatacaatattagaattaatgagggtataaaaatgaacactatagaattaaaaattagagtattatgttctggattaaagtatgataaaaatgtgatatatgaatacagtaaacgaaatttcattcctaaaagaagggcgtatggaacaagtgatagttctaaattagaaacaacacattctgtacctcaagaagttattttagaagatggtacaattattgcgtgtaattataatgaaagctctgattatgatttaatatataaaaatggagatttttatataaaatccggtaacattttgtttaaagttatatttcctattaaacctgatatatatggtatggaacttttagatggcagtagagtagaagaatacgtcacggtgtacggtgatacaactttgggttttttctctccagggcattgttattattttaatgatggccgtcagtgtaaattttgttcattaggtgaagctagaaatagtttatcagatcataaaaagtctattagaccgtcaaaagtcattgaagttatgaatgtaatagaagctaataacattagtagatataaaagaatactcatcaatggtggtacaactcgtaattatgatattggttttgaaatgcacaaacaattattagtttctttaaaacctttttgtaaaaaaaataatcttaacagccatctaatatcaatgccccctagagacttaaataaaataaaggggatttctgagtttgttgatagctgggctattagtttagaaatatttaaccctaaattatttgatcagatatgtcctggtaaatctcaggactatgggagaaataatctattagaagcatacctggctgctgtttcagagttaggtgaaggcaatgtttatgttgggtttgtagcgggattagaacctttaaatgatttagtaaaaggaatggaatttttttcaaaaaatggcatagttccagcagtagcagtctttcatcctgatcatggttctgaatatcaaaatcaccctagacctatttttgaagatatttataaaacatatgttgagatgcataaattatatcaaaaatatggattcaaaccatttattatcggtagtggtagaaattcacttgatactgaagcgtactacggggaaaaaagaaatgattaaacgcggtttatttatagcttttgaaggaaatgatggtgccggtaaatcaacaatttcacgagaagtttatgatatcttatctctagattataataatattgttctttttagataagaattatcctttactgccatctgggtatagtatgtatcacatgggaaaaatacgagatctcctttgggattatgacatttcagctccattgggtgaacttggtgaccggcattggattctattgatagcatcatggtttgctgttttagatagtttaattattcaaccgtgtttattacaaggtaaaattattatatgtgatagttggtattataaatatttagcaagattcttacttaaatccacggaattagcaaaattaagcaaatcggctctatctataaacacaaaaccagacatggtgatatatcttgatgttcctccaagtattgctgaaaaaaggaaagaaatattaaaacctagtgaatctggaaaattagagataaatgaaaaatatgatttcatagaataccaaaaacacgttcttaatcaataccagacgttttatgatgacacttggaaaattattgatgctgacacattaactaaagatgcagtaattaaatcaatagtagatgttattcaattggaaatactaaaaagaaggtaattattgcaaccgctatatttactgaggctattttagttggaggaaaataatggataaagaatttcgcaaattaatattagcctcttcagggaattctttcaccttgtatttggagatgataatatcatttacgttaattacatatcactggaacggtggagcaatatactcatcgttatatacaatttcatatgctgcatcgttactatttctaacgccctatgtttcgtcatttgtagatgaaaatataaaacccaaaaagtacattattatcatttcgttactttgcggtgttattaccatttttcaatacaatattgatgacatgaatatatatattctttattcttttattaaaaacatcctgcgtttatttttagggccttctaattttaaaatattaaaaaacatatcaaccaatcaatttgaaaaaaactttagttattggcaggttttatttcaaatatacaaaatgttagccccgttatttttaggttttattcttatctattactcaacaaaacagattcttattttaatatcaatgctttattttatttcagcagtcttatatatttttgtttcagaaccgttgatcaatgttaatcgcaaaaaaaacaagatatcactaattaattactttaatataatgaaagataataaaatattgttttcatttattgttatttccactttaacttgttttggctatctatcagatagcttaatagctcttagctttatggcgcagggattgaatggcagccattatagttttgccatgtgtctttcaggtatttcaggtgttttaattggtttagtatttggaaagtataagattaacatatctttaaatactatgttatcttcattctttttgtggggaacggggtatcttctaataggaatagcaaatcaatttaacgacttatttcctgataaaatcaatttattttttatatttttagcaatggcaataataggaatgggatcgtccatgaataatattattattaccatttatatgcagaaattcgcaactaatgataactcggctaaaatatttggcttaacgtcaatttctgttggtttttctatgtttattggccctttgataggttccacaatatcttatcttttttccataagcatcgttttttttacaacatttataggtatttttttaactataattggggttattttaataaatcgtaaattcacgtcatgataccgttttacccttttactattgtgggaacccagtgaacaaaaaacacaattttagaaagtttaattccagcaatagcaattattattaaattctttcaaaaaattttatccgaattagttttgaatcgatatgacagacaccgatataaaggtatctgtcagctcaaatcttcgttattacaccaatttatcgtgcagaaaatatctacaaagcgtcattatcatcatcgtatgttcgactcgcttcttggataacaaactctttaacagattgaacgttgatggggccgttgggaccatatttgtagacattgccagccagatcgctaactaaaaacatgacatatgacattctatcgcgttgcctatttctttctgtgcgagcaacgccatgtatattggctcgaacattcggggttaaattttctgtcagcacttcgatcgaactaccaaagttaattattaggtatcctggaacaggctcaatagctaaaagctcatcatttatataggcaagaaggccacgttcagttgatcttaggacggtcacccatcctgaatcccgatgaaatttagagcctcggatggctttctctgatcggaagtggttaaacgataacatctggtttcttagcccttctgaaataccattagtaatgagttcccaatcacgacgaggaataccaacataagttagcacagagcgtagtacacatataccgatgtgtgccatatggtgacctagtgttgcgacctctgatggcatgaggtgccaattttcccgttcgaggcggaaatgttcccattgatcatgttctctgtcgaaataaccttcgtaactattggaaaaagtatatgatttgaatcccgtataggggcgaaggtcaccttctgtggcgggttcaaagaagtggtatgcaaatcgatcgccgtgttcaaaatccatatatgatggtgctttcaggaggaaaaaaccatcccggagggctcggttaaagccgtctttgtcagtaaaaataagatcatctccctctagataggagcgtgccatgtctgctgatttatatgtttttgaggcttcgctttctgatggcattggtggtagcttgattggcgttcgcattgttgatgatgttgtcataatgatagtccttagttgtggtaacagaacttttgtttatttttttgtatctttgaaatgtatattgccgatattacatgtggtgcttattcttatattgttttcttatagtgtattaatcttttttttcgttttattagaatttggataattatatcaacaagtttattgattaaaatcctaagtaactattcggcaaagtaattaatattggtcactaactatcctagctgactttttgaatattacaagaatttgatggcttatatatgaaaaataatgaaaatataaatagcgataatagagtcattttttttaatcgattgttaatatgaaagttttataaattacttgatgatgttttattgcttttattatttgttattaaatgtgatagtttaccaatgatatttttataactctcattaagagcctatctcaataggcgtaattgttgcaggcagtttgaacacggacagcgcggaaaaaccggagcgtacacgtagtacgtgaggattttgagcactgcccaggttcaaaatggcaaataaaatagccctattgagataggcagttaataggggaaatggccctaagagagggccatttattatatttatttaacaacaaatagttgcaggaaaagttttatgcttcatcataatattcattgatataaagcgttagttcaattcctggcttgatatctgttgtttttataccatcgttccagttcattaaatccttaatattgatgccatgacgtttagctatactggcaattgaatcaccttggcgtacacggtaaataatagcattgtcattatttacccttaataattgtccgatttttaacaatctggcggttttcagattattcaagcgctgtaattcacgggtggaaatattaaaccgcttggcaatagcggataatgtatcacctgaacgaactttatattggctttgtttactcagtcggtggttgtttttagcaacttcttggcgaatattgctcaaaactgttttatttgccagcgagtttttaaactgattaacttttgcctttggcagcatgatgtaatgcgggccgttaggtgatgtcactcctcgcttatacccagggttgtaggctttaatcgatgtcagggacatgccagccagttctgcggcttgagacagcgtgatttgttgaccaacatcaatttgagcaagtgcccgctggttattggattttggcagcgtaatgccatatttatcgctattacggatgacatcactgagcgccagaactttaggcacatagagcgcagtctcccgtggtagtgataatgaccagaaatccgttggcttaccttttatctggttttcttttattgcgcgcataacacggccttcgccgctgttataagcagcaatagccaataaccagtcaccattgaacattttattcaggcgttgtaacagattcagggcggcagtggttgatgcggcaacatcccgacgtgcgtcgtaccatttatcttgagtaagaccgtaattgcgacccgtatccgggataatctgccacagaccagcggccttagcatgtgaggtagcatgcgggttaaaagcactctccactatgggtaccagtaccagttccatcggcatatcgcgttgctttatctgcctgactatccagtacatatacggttcagcccgtaaagttacatcgtggagatagctcttgtttttcaggtaataatttcgttgttcacgtaccctgtagttatcagggattttcatcttcaactcatcacggatatatccccacagctcatgctgagcgccagaatcaccctctccccagtaagcagcaagctgattggtattatcagttgctatcttgccggtctttagactcgttgaagacgaattctgtgcccgttgtccggctgtcgtcgaccaatcaggccctgattgacagccaaccagcaagacagatgcgaacagaatcgcttttgtcttcataattaatttttatggttgcttaaaagacgaccaataatacttatcttggtttgatatagcaactctctcaatcaaaattgatctttttgtcttcttagttggtggaaaacggcggaaagcggttgagagttgggtgtaatgccaatatttctttgtaaatcaatatcatcacattttaagaaaatattgatttttttctcagtttgtaatgtggttggtattgttggttgattattttccctcattctgattactttttgctggtattcgctgatagtctgattaggtaaaacagcatgagcaaacttcatattagaaatagtatattcatgggcacaacagatgagtgtgtcatcaggcagctcagctatttttccgatagatgtatacatttgctcagcggtgccttcaaagagacgtccacagccaccagagaacaaggtatccccacaaaagagataaggcgcttgataaaaagcaatgtgccctagagtgtggcctggaacatcgatgatctggaaagaaaaatgaccaaaattgatgctatcaccgccacatactatgatggtggcacctttgctctgggtttctgctgggccgtatactagtagctcagggaatcgatcaataattccagggacgccaccaacatgatcgtgatgatgatgggtaagtaaaattgcatcgggtatccagccacgagattccaaggtatcaagaacaggttgtgattctgccggatcaacgatgacaacatgtctattttcgtcacaaagtaaccaaatgtaattatccgaaagggcaggaatgctgataagctccattgtatacctcttattttaatagcgggttataaggaaaagaagccatgaaatctgcacatacaatacagaatataaatcccccggcttcttgggctgatttaccttggggggagtattaccgtgccgctttggagcgccaattacaaccctggtggccaaaaatatttggtttccatctgctgaaagtcggtaatttgagtgctgaaattgacagtaatggctgtccgatttttaatcagattaatgtcggtagggaaggcaagaatatgcaggtgattagcgatccttaccatctgccgtttgaagaaaagtccgttgatgcttgcttactgagtcatatgttggcttacagcgctgatccccatcgtcttttacgggaagttgaccgggtgatgattgatgatggctggctcattatcagtggttttaattcattgagtctgcttggtttggggaaattagtaccgggattatggcgtcatcaaccctattgcagccggatgttttccatgatgcgccaacttgattggttgagcttgcttaattatgaagtggtgtatcgtgacagctttcaagtattgccctggcgaaatgaaacaggtttttctaatcggcacttgtctgtattaggctgtgtcagtctgattattgctcgcaagcgcacactgccattaacactaaaccagagaaaagtgacgcgattaaaacctaaattgggcaatgccgttggcgtaacaaaatgttaccggaagcggtaattaatctctattttcgagatatcccgtgtcggtttctgttggtgagtttgctgcggcgcgggccagttcatcacaacgctcattttcatcatgtccggcgtggcctttgacccattgccaatcaatgttatggcggctaatggcttgatcaagacgctgccataaatcgacattgctgacaggagatttatctgctttacgccagccacgttttttccagttatggatccattgtgtaatgccttgacgcacatactggctgtcggtggttaagacaattttgcaagggcgagtcagtgtttccagaccaataattgctgccatcagctccattctgttgttggttgtatgataaaaaccttcgctaagggttttttcgtgttgttgataacgtaataacacaccgtagcccccaggccccggattgccgagacaagatccgtcggtgaaaatttctacctgcttgcccatatctggtagactcttcttattcaattcaaaaccctaagtttgacataaaaagatattatgagcacggcaattacacgacaagttgttcttgataccgaaactaccggtatgaataaattaggtgttcactatgaagggcacaaaattattgaaattggggccgtggaggttattaaccgtcgtttaaccggtcgccattttcatgtctatattcagccggatagattggtcgaccctgaagcatttgaagtgcatgggatcagcgatgaatttttgcaagataagccgctgtttgctgacattgcagatgagtttattgaatttattcgcggcgctgaattgattatccataacgctcccttcgatatcggctttatcgattatgagtttggcaaactgaatcgtgatattccgccaactgcggatttctgcaagattactgatagcttacaacttgcaagagggctatttccggggaaaaggaataaccttgatgcgttatgtgatcgttatgatatagacaattctaaacgaaccttacatggggcgttactcgatgctgagatattgtctgatgtctatttgataatgaccggcgggcagacttctcttgccttttcaatggaaggagagattgctagcggtgcgaatgtttctgaaatacagcgtattacccggcctcaaatggcattaaaagttatttatgcaacggatgaagagctcgctgcacatgaatccaggttggatttagtggagaagaaaggcgggagctgtttatggcgtatgaatcttggacaaagctaatataaaattgccgataaatcacctttttgggtgaaaagttgatcaggtgcgccactttgttataaaaaatattgacggagtgatcttggattcgtaatattcacctcgttctcaaccagaacgctgcgcggtgcggtagttcagtcggttagaataccggcctgtcacgccgggggtcgcgggttcgagtcccgtccgcaccgccaaagattccgaagccctgggtagttgcccggggctttttcatttgtacttatacccgtcatctttcaagttgtctctttgttggctgcactcactcaccccggtcacatcgttatctatgctcccggggattcgctcccttgccgtcgcgatgcatcttgaaatccatagggtatatatcattcaataatctctcgataatagacaatggtgaaattgcattgaagtaaggcatagagacgctaccagctttctatagtgcttgtttctgcaattcttattaggaatttattttctttgccaggcttatagcgtgatggccaaatatccgatggatgtaaacccaattcagtagcgattaatgcctctccctttggccacgggcgatgtaatgcattactcaatgtcgaggatgctaatccggctttgcgggaaacggctgaaagatttgttccttgttttcttagtgctgcaataatatctgccggatgccagtcttgaatatccataaataatccccaaattttaattgtgagaaaaacattgataatagataaattatcaatgtcttgctgtttggtagtgattaggtgcagattatcaatgaatattaattgaattggctatcggagagaatactgaataatggcatcgattgttttatgggaaaatataacctatatattgaaggtgttttttttgaatgtaaagagtattattattttatttgaaaaatatttttaatttaataacttaaataaataataatttctcatgaatacttttacgccgttttttatataatttattaacggttttatattcacataataaatgcagtgaaatttcttatttttttaaaccacgacccagaaattctattccatatatcattgagttgagtcgtggtagaatcaagttccttatatacccgtcatctttcaagttgcctctttgttggctgcactcgctcaccccggtcacatagttatctatgctcccggggattcactcccttgccgtcgcgatgcatcttgaaatccatagggtatatatcctatagatttgagttaatagaaatttacaactcttggctaccaatagtgacgaatctttctggaatatatagatcaaacttatttgctttgcagaaatcttttaattttatatgcagtggtagattaaatttttgataaattgactgaatatgattaacggcatcttctgtgcttatcattaattctttgctgatactctcttcatccggtgagcgaagggctagaaaaagaacttcccattcagtttgggtgagtatgtcgttaggcggtgtaaattccaaagccgctggaggtgatttttcatgatagtaagcagtcgaaaagttttgcgctttggacatgtgaaacgtgataccgatgcagttcccattttcatcgcaaagtgggtatttactacagcgataggtttgcttgactttatttcctccaaaaaggtgcgtctcaagtgaagtgactgttttcatggtttgcatcactttttgatcctgacgacaatattcttctgtatattctgcaataggtgaaggtaattcgtccgttgaaagtcctgaaatatcgaaatcttcaggcaaattgagcagttggtaaaaagcaggatttgcgtatataaattttgattggcgatctttagcgccccacggctcattacttttttcccacatgtaaattaattgcggggtgatattatttggtctttttctgatgtttgacatgaaagtaccctgactgttaattaagtaattgtctgtatacccgtcatctttcaagttgcttctttgttggctgcactccctcaccccggtcacatcgttatctatgctcccggggattcgctcccttgccgccgcgatgcatcttgaaatccattgggtatatgtctattttatgtgttctatttaaaataacctgattatataatggattgcaataattaattcgccaaaaaaataatatttttttattttatctatatctgttaattaaattacttattattttaggtaaaaatatcatcatattataaaatataaccataagtattattttattttaaattgtttatttgtttgttgatattaagagagtattgtcctattgattgggaacaatataaacaatcaatttagttgctgaaaattgccataaattaagaatgtgttgcctcttaattggttattttatctcttgatttgcaactaatagctgtgtttaattaatttcccccctttgtatgcacagtgagtttgtttattacgttgatgatgctgaaattcattgtagaacagtaaggcaaatcaaagaattgccgttcagatgaaattaagatagtttcctgatatttggctttaaagattgcggtttgcacgctgtgctgagaaaattattcccctaaacgtttttatcccacttggagtagaaaatgaccactcgtaaaacccttgctaatgctattcgcttcctgagcatggatgctgtgcagaaagcaaaatcagggcaccctggtgcacctatgggaatggcggatatcgctgaagttttatggcgtgattatttgaatcataacccaactgatccacattgggtcgatcgtgatcgttttgtattgtctaacggtcatggttctatgctgatttatagtctgttgcatctcaccggttatgatgtttcagtcgatgatctgaaaaatttccgtcagttacactctaaaaccccaggccatcctgagtatggctatactccaggcgtagaaactacgacaggtcctttagggcaggggattgccaacgcagtcggttttgcgattgctgaacgcactctggccgcgcaatttaaccgtcctggtcatgagatcgttgaccataatacttatgtctttatgggtgatggctgcatgatggagggcatttctcatgaagtttgctctctggcgggaacgttaaagttaggcaagttggttgctttctatgatgacaatggcatttccattgatggtcatgttgaaggctggtttacggatgatacggcaagccgttttgaggcgtatggctggcatgtgattcgcggtgttgatggtcataatgcagattcagttaaagctgctatcgaagaagcacgtaaagtgacggataaaccttctctgttaatgtgcaaaacgattatcggttttggtgcgccaaccaaagcgggtacccatgattctcatggcgcgccattgggtgatgcggaaattgctgcgactcgtgaagcactcggttggaattatccggcatttgaaattccagcggaaatctattctgagtgggatgccaaagaagctggcaatgtgaaacaagccgcttggaatgaaaaattcgctgcctatgaaaaggcgtatcctgaattagcggctgaatttaaacgtcgtaccagtggtgagttaccggcaaactgggaagttgaatcaaaagcatttatcgaacagttgcaaaaaaatccagccaatattgccagtcgtaaagcatctcagaatgccttggaagcttttggtaaggtgttgcctgaatttatggggggatctgctgatttggcaccaagtaacctcacgatgtggtcaggttctaatccgttgaacgaagatcaggcaggtaattatatccattatggtgttcgtgaatttggcatgtcagccattatgaatggtatcgctctgcatggtggttttgtgccttatggtgcaaccttcctgatgttcgttgaatatgcccgtaacgccgtgcgtatggcggcattgatgaaaattcgcagcatctttgtttatacccatgactcaattggtttgggtgaagatggtccgactcaccagccagtagaacagctcgccagtttgcgtgtgacgccaaatttgagcacatggcgtccatgtgaccaggttgaatctgcggtggcgtggaaatacgctatcgatcgtaaagcaggtccatcagcacttattttctctcgtcagaatctggcacagcaagaacgtactgctgagcagttggctaatatcgagaaaggggcttacatcctgaaagattgtcaggggcaaccagaactgattttgatcgcaacgggttcagaaattgaattggcggtgagtgcttaccaccaattgactgaggaaggtcgtcaggtgcgcgtagtctcaatgccgtctactgatgcttttgataagcaagatgctgcataccgagaagcggttctgcctgctgcggtttctgcacgtgttgcagtcgaagcgggtatcgccgattactggtttaaatatgtcggtatgaatggcgctatcgttggtatggatacatttggtgagtcagcacctgctgatcagttgtttaaaacgtttggtttcactgtagagaatgtggtcgctaaggctaaagctttgctgaaataatcagtaaattcatgaatgagcgcacctgaggtaaacattgagcgggtgcgctctttttctgcacgatatcgttattgacgatggattgtgacgattttccttggcttatgccacgcaaattccagggacggctactttttggaatacgtgaggcgaaccgacaatcccatcaggatacttggcgagtttctccttgaattcagggtccgtgaacgcggcgcggaaacgctccagactctcccaaatggcgtagttcatgaatgtgccgctgccagcgattccgcgatgtaattgtgcggaaatcagtcctaccttagaccggaaatattctgcatcttccttccaggtttctattagggtgtcagccattgagggatcaacatggaatatgttcaccagcacgatggagccatcggtgttcgaaaataactgttcccgcagggttacgtgggtgtccatttcttctagcttgaccatttctatctcctgaaaattatgtgtttatatttatacccgtcatctttcaagttgcctctttgttggctgcgctcgctcaccctggtcacatagttctctatgctcccggggattcactcccttgccgtcgcgatgcatcttgaaatctataaggtatatgcttgtattgctatcctgccgaggcgagtcgcgtgatttacgtggcttttaacggcaacaatgtgtcaacgtagagacaaatgtgttccactaattcatgctgtttccacgttgtatttcgtttaactgtttggtagctctttgtcgttattaacgaacgaatccgtagcactatgttatgtagcgctatgttatgtagtgctatttttatagtgctatttttatatagtgctatttggtactggtgactcttccagcttcgtctccaggcttatcaaggtgtttaatgtcacttttagctcgttaggatccgtggattgcaccagtgatccgacccactcagcttccagcgatatcgccgcatcaaaagtacgccgaccaagctcggtcagttgatagagtggtgagcgttcatgccgagggttcgtgatggttttcaccatccctgagctcagcccgagattcaattgcttttgcactccttggcgtgtgatacccattgcggcggcaatctgaggcgtggtaagtggatgtggtgcgtgcgcaatcgcaccaagtacttgccatctcgcactcgtgattcccaacggggcaacgagctgatcccctttagagagcagtagggcgttgagccgaaataccgccaatgtgatctcagtgaatacctcgaacgccgaagttttctcggttgacacgatttacttccttttccttaagtacatcaaaaaacgacaaccagtttccacttttcggggttaaatgtcaatatttcaacaagtgatgtagggaaattaatgtgtcacatgtgatttgtgacagattttgccttactgatgaagacgagctttagcctttatttgtagcaaggcggtcattgagcgggtggactgttggtagctgacggtgaaggtggctgtagttgcttacaggcatctttaatatgctgagtttctatagccacggttgtgataaggagataatcgttattcgaatcagttgcctggaatagctgccattgcgggttcaatcaagcgcctaagtcgttcacgaggtacgccgtcacgagcttggaatgaaatagtttgggtcaaaccaaggaaatacgacgccaacacatccacgtttgtattgggtgggagatcaccgtcggtgattccttgctccaggcgaacacggatcatatctagggttttggtacgtgcatccctgagataagcccatacttctttgttttccgttagattgttcacaacacccaagacaagcaggcatcctccagcttgatgagaagaggcgatattgatggtactctccagcatcgcgcgcaaccctgagcgtgctgtttttgcttcattgagtgcttgcattgactggacaccgatcgtcttaatgtagaggtcgactgctttgcagaaggcgttctttttacttccgaaggctgcataaaaactcggtggattgatgtccatagccgcggtgagatcgactaactgtgtaccttcatatccttttgaccaaaatacttccatcgcacgtttgagtgcgatgtcccggtcgaaattggggggtctccctcgtcgagacatgcaatttcctcatataagcttctatattttgtagtcaatataacataaagatcttgatcaattttggcaagcgcgatagatttttgtagtaggttttataaaaatacgctcaagcgagaagattctgactttgaaggttccacatccttcatcaagactagatccacagagctgtaaggtgctgttggggcctttattacagtgacagcatcatctgtatgctggcggaatgttagccaatttaggcagcgtgacattcgtgctgtaattcgtcctggaacgatcgaggaagttcaggagatcgttaggatctttaatcgcttcaagactcatgctggactgcacgctattagcacggggcgcaactggggattgggatcagcacaaccggcaaccgacggtgtggtcacgatagatcttcaacgtttaaatgtgcttcgtgagatcgattgctcatcagggtgggcggtgattgaatccggcctcacacagatagaacttgcacgttttttggtcggtactgatcggatgctgaatgttacggcatcctctggccacactagcgtggttggaaatgcacttgatcgtggtgttggtctgcgtcgtcagcggattgatgatctcgccgggctggaggttgtgttaccggatggtgaagtagtcaaagtggggtggtggccggatgaatccaggaaaactgccgtcaatccgtatgggcttggacctgctttattgcatctgttcacacagtcgaatcttgggattgtgactgcggctgtcatcaaactgctcccacggccagagaggcagtgtattctgagattgacttttcctcgggagaaccttcaagcagcgattgcagaattgcggcggtgggtagctcaagagcttgtctctggtgttctcaaaatttatgacaccatttccactgagtcgtatggtggtcggtgtaccacaagatctcagtaaacgtacttactatggtcgcccgcaagagcaagactacctgctcgacttcaacttagatgcgaagacattacagcgtcatatccgggcaggatatcgtcatcctggagcgcacttcttcctccccgatggtaccaaggtggttgttttgtctgcaatagtgccccatggcgtagatataggcgtccctaatttgcctggatgtattgttcaaaccgcgtcaggcattttcattgcgacggctgatgagtggctgcaattactcacagttgaagtgaatggtgtcgagagtcccgccgtgcctaatactatacccgagattttcagactggcccgtcagatgactatcagagatgaaatagcgtccaatacacaagaccaaatggcttgtgttaccgatttctagcgagagagatgatgatgagtacgactgtggagaaccaaccattgcaggttgtagaagatgtaaggcacacctatttgtcggctgggagtggccccaaggtttggatgagtggcgatgagtatcacattttgctcgatgcaaagagcagtggaggcatgatgacactgctggatgctctagtgccgctgacaagcggccctcccatacatacccataaggatgttgatgagctgtttttcgtactagatggtgaattggaaattatggccgatggtgtgttgcatcaagtcacggcggggggcgcgtatttgtcaaacggggcatcccacacgctttcatcaaccgtacccgcgaccctgtgcgcatgttgatcatcggcgctacctttgctgcattcacttacttcacacccattcttaaagatattacgggttacagtgatcgggcagtagcgagtttattgtttatctatggggccgctactgtgatcggcaatgacaggtttgacgaaaggactggcgcgtgatcttggcggaaagggtgtcacggtgaaccagatttctccaggccctattgatacggacatgaaccctgtcaatggttctaatgctgatttctggcgcagacttactgtccctggctggtatggctcaacaactgatattgcagccgtcgtgagctttttggcaagtaaggaggctgattttgtcactggtgcggatattgcggtggatggtggaacaaatatttgatttctggattggaatcatagtaccacctgttcattttaggcggctatgggcgtgtaatagcttatataccctatggatttcaagatggatcgcgacggcaagggagcgaacccccgggagcatagataacgatgtgaccggggtgagtgagtgcagccaacaaagaggcaacttgaaagataacgggtatagccgtcttcaatacacttatgtttgagttgagcgccaatctttgaatgttctttttaaataacccagaataaataggtcattattttgtaatctttcattttatgagttggtcactttttactattgctatcaatttccttttcccgtaatctcattatttatagctgaatcgtttcattttgttatctgacgcggttttctgcgcgcagttttggcaattttgtgataagcagtcagtacatcagtgattgagtcggttattctaagcggttgcgtggtaataactatattcagggagtaacatgacaattaaggtggcaataaacggtttcggcagaatagggcgtagtattttacgtgctctttatgagtctgggcgtcgggctgaaattgcggttattgctgttaatgagctggcagatgccgaaggaattgctcacttgctgaaatatgactctagtcacggccgttttgcttgggatgtgcgtctgaataatgatgtgttgcaggttggtgatgataatattcgtttgtttcatcaatctgatatatcgatgctgccttggcaagaactggggattgatattgttcttgattgcagtgggatttatggcagcagagccgatggtgaggcacatcttgccagtggtgccaaaaaagtgctgtttgctcatccgggggggaatgatttagatgcgactgtggtttatggtgtgaatcagcatttactgacagcagaggatcgcattgtgtccaatgcttcctgtactactaattgcattattcccatcattaaattattggatgatcaatttgagattgaatcgggtacagtgacaaccattcatgcttcaatgaatgaccaaccggtgattgatgcttatcacaaagatttacggcgtactcgggctgctagtcagtctatcattccggtggatactaagctggccgcagggataacccggatttttccaaagttctgtgaccgttttgaagctatctccgtgcgtgtaccaacgattaacgttacagctatcgatttaagtgttacggtaaaatcttcagtaactgttaataaaatcaacgaattaatgcaaaaatcagcagctacttcatttcgtggtatagttgactataccgaattgccgttagtttcaacggattttaaccacgatccccacagcgcgattgttgatggcacacaaacgcgagtcagtgggcaacatctgattaagacattagtctggtgtgataatgagtggggatttgctaaccgaatgttggatacaacgttagcaatggctgctatgggtttcaaatgatttgttgttgatcgacggtccatatatagatccgcacacggcgcaagattaaataatttagagaatcaatgagaggattcaccatgtctgtaattaagatgaccgatttagatctggcgggtaagcgtattttgatccgcgctgacctgaacgttccggtaaaagatggcaaagtcacctctgatgcgcgtatccgtgcttccttaccgaccattgaggcagcattaaaacagggcgctaaagtgatgatcacttctcaccttggccgccctactgaaggcgaatacagtgaagaattctcgctgaaaccagtagtagactatctagaagagaaattatcttcccccgttcgactggaaaaagagtatctggaaggcgtggatgtcgcggaaggtgaactggttgtgctggagaatgttcgctttaataaaggtgagaagaaagacgacgaaaccttagccaaaaaatatgcttccctgtgtgatatttatgtcatggatgcattcggtactgctcatcgtgcacaagcttctactcacggtgtggctaagtttgctccagtggcctgtgccggtcctttgttgtccgcagagttagaggcattgggtaaagcgttagataatccagcccgtccaatggtggctatcgttgggggctctaaagtttcaaccaagctgaccgttctggatacgctgtctaaaattgctgaccaattgattgtcggtggtggtatcgcgaatacctttgttgctgcggaaggccataatgtcggtcgttctctctatgaagacgacttgctcccggaagcgaagaaattgctgataagctgtgatattccggtgccaaccgatgttcgtgtggcaacagaattctctgaaacagccgaagcaatcttgaaatctacccacgatattaaagatgatgagcagatcctcgatctgggggatgaatctgctcaacggctggcggatattctgaaaaacgccaaaacgattctatggaatggcccggttggtgtatttgaattccctaatttccgtcaaggaactgaaattgtcgcgcgcgccattgctgatagtgatgccttctctatcgccggtggcggcgatacgctggcagcgatcgacttgttcggtattgctgacaaaatttcttatatctctacgggtggtggtgctttccttgagttcgtggaagggaaaaaactgcctgcggttgtgatgttggaagaacgtgcaaaacagtaattaagtcatgacgggtagcggctgattggctgcctgcccgctctaaacaggacccacgtaacatgtctaaaatttttgatttcgtaaaaccgggtgtcatcactggtgatgatgttcaaaaagtgttcgctatagccaaagaaaacagctttgctttaccggcggtcaactgtgtaggtactgattcaatcaatgccgtgttggaagccgctgccaaagttcgttctcccgttatcattcagttctctaacggcggtgctgcttttattgccggtaaaggtttgaaagctgaaggtcaacaaacggctattctgggttcaatttctggtgctcaccatgttcatcagatggctgaacattatggtgttcctgtgatcctgcatactgaccactgcgcacgtaaattgctgccgtggattgatggcctgttagatgcaggtgaaaagcattacgcagcgacgggtaaacccctattctcttctcacatgattgatctgtcagaagagtctctggaagagaatattgagatttgcagccaatatctggctcgtatggcaaaaatcgatatgacgctggaaatcgagttgggttgtactggtggggaagaagatggggttgataacagccatatggatagctctgctctgtacactcaaccggaagatgttgcttatgcttatgagaaactgaacgctatcagcccacgtttcactattgcggcttctttcggtaacgttcatggtgtttataagccgggtaacgttaaactgacgccaaaaattttgcgtaactctcaagactatgtttctgagaaattcaatctgccacataacagcctggattttgttttccacggcggttctggttctactgcggaagagatcaaagaagcggtcagctacggcgtcgttaaaatgaatatcgacactgacacccaatgggcgacttgggaaggtattctcaactactaccaaaagaacgaaggctatctgcaaggtcaactaggtaatccagaaggcgcagataaacctaataagaaattctacgatccacgggtatggctgcgtgccggtcaggtttctatggctgcccgtctggaacaggcattcaaagaattgaacgcgattgatgtattgtaattagtgaaagcgttccctctgaattttcattcagagggaacgttagccgcattcagtaaatgagatgttacatcgcatctactctttttatcatttccattgcaacagccatagacatgaacagtttgctctttgtctgaggaaactcctcaaaccctacgttcatatacagttttttggctatgtcgttcttcgcatcgacgataatcatcggggtaggaatagattttgacgactctatagcttttcgaattgcatctataagcaatatttcaccaaacccttggcgttgaaatgacttacttatagctaggcgaccaataagtgcgcaatgtagtgtagaaggggactttttcgatattttctctggtagttcgtctagctctaccgtgcatagtgctagggaatagtatccctttatttgagatccattttgactacttgtaaggacgaatgttcttgataagtcctttttatcatgttgtcccgatactgccttcaagtagttgtttagtgcgggttcaccacagttaaaattatttctatcgtgtttgtttttatctagacgttctatcttcattttttattgtttctttatgtctacgagcagcacgaaggaaacgttcgtttactttgattggtttttccaatgcatgaacaaatgccaatgcatcttcttgacacaattgaatacgcatattttgttcaatgagtctttttgcctctgctacagcagcattggcaataaagctattcaaacttgcataccctgatagtgataacgccctttcaagtagctctttggtctctgaactcacccttgtggtgattctttcatttgctaatgtggtcataagccttactcctaccgcattgcggttattagttctttagttcactatagatatccactactcgtttgcattatttatttggagctagcggaacatattggtttagtgaaatgctaagtttgcttcattgactagtttaagatttttttttaacaaaattcaacatgtgtgccaaaatgacgccataattgtgagactaaacaaaccatagtcagatagaacaaaaatcatcaaaattcgggcgcaagtgaatccgagtatgcagagttgttagcaaaaaccgccgtaaaccctctttacggcgggaagcagtcacctgagttgtactagctctagtctgagctagtacagttagcttctatttaaagttctatacccgtcatctttcaagttgcttctttgttggctgcactcccttgccgccgcgatgcatcttgaaatccatagggtatgtgaccaaatttatgaagctctccgcattcctaaattcttagcgatagccgcagagcgaatattaatagcctctgttgatattttattgatcttctgccctttcaatgattttttaattgctttcattgccaggaatttaccaacgcctttgaaattatattctctatttattgcaatagcgggttctgtttcttgcaccagcgctctctcttcattactcaattgcgtatagggatgagccagtgcatagttgacatgtaattctgattgtttattttttaaatcatgataaaccttaacctctattgccgcataaatttttctttcaccggaataatcatttttttcacttttatccattaaagcaaagaaatctgttgctgcataaaaatcgggatgattgcttctatacctatgcccttctgtatattctgatatcgtatcttttatcgtttttgccatataaccggatatttcagatcccaaagaaagatttgtttttgatttttctgaaagggatctgttttcttcgagccggctatatataatttggcttttttctatgccttttagtaactcttcgtggcttagcaaataacccgacggatcggaatcaccgacgcgaaccactttcaatgatttattttttgtataactactttctttctcgttccatttgacaacatgtgaatttttggctgccaatttgaattttaattcatcaaggaaattcacctctttagtatattttcctctttctggtgctaatccattttcatcctgcaaacttactggattatttctcaccattcggtatagattcagcccatcaatggttcctgccggatccgcgcttaaccatctgcccgcccacggttgataatagcggtaaccgtaataatacagcccggtggtatcccgttctttgcctgaatagcgaatagttttatagttggcttctgtttggctattggctgcccacatcgctgtgccgccgaatggataatactcttcctcactaataatctgcccttggttgtccagttcaagctggctggagccgatcagattatcgtagctgtaacgtagctgattgttgttgataccttctggtttaccgctctcccagtgcagcacccgcacctgtgcgcgacccgcttcacctagtgtgatcacgtgtaactcttctgttgttgtggtgctgttctgggttgtgcgtagttccagccccggcagatagattacccgctgctgctgcgtagtattctgggttggctgttcactcactttcagttgtctcattccgttgctgccgtatcggtaccattcatttcctgaaccgttattgacctgctttaactctcctcgtgatgtccagaccagtgtctgaccgggtaataaactggtttggtgaccaccggcatcaaataacgtatccacttgatttggatctgttgtcagcgtactgagaacgccgcggttactgcgattcgagatggtgatagcggtggtgtagttattttgggtagccgatgaactgtgccgaatttgcgtcagattaccgctgtgatcataactgtagcggcgagtatagttagtgtaggtattgttgtcggaaggtagcgcaggggagggcagttgattattttgctgacctatattggccatttcacgcccagtagcactgataagctggtacagggagtcgtaagtatagctattctccgggaccactttctgattgcgccaaaagcgggtggcttccgcatcgttacggatattgatcacattgcctaccggatcatattgatagcgtaagtcttgcaacaccttggtatctgacggacggcgggtagtgataccaataagccgttgggtttctggttcatagctgtattcggtgataaccccgttaccgtgctcttcacgtaatttttgtccggcggcagagtaggtcagcgatttgataatcacttgttcggcttgacctttgagtgttaaccaacagccttttagctgcccggctacatcataggccagacgctggatgttgcctttggcatcggtctggataagtaaagccccggtggcatcagtgctattttgggtggtatagacatcactgctcagtttttgctgccagaggctttgatcttcacctgtccagtcggcattttgatcatcgacgagcagttgttgagattgtgatagcacgacgccagccagagaaaggctgttgagttgagtgagtccagcggtatcgtagtggcggacacactgaccagcaaggttgtactctttttcttgcggcgtattgccggcccagataaggcgctcggtcattttctcttctgcctgcacctgttcggtgatagcaagtaagcgaccgggtaggatgttatcttcgtagtgatagtcttggcggacaccggttgcattgatggttaataccgggcgaccttcaacatcgttgaggatgatagttcgaccggcatcaaccccttcttcacgtagaacctgacccgcgagattaaagacgcgaatgaaattcgggccgctctgatttttattcttacgaggatcagtactttttacctcaaatccttgaatattgaactcatagagtgtgatcaattcatcactgttttcatcagcttgagtacgtagatattctaaagtacgtacatttaacctcctgttatccaatacactgattaatggtgtttttttgtcaatttcagaacgataactgctcatattttaactccttagatggtgttaatcttcaaaataatttaagttacggcaacaactaaacgaccttatatcactaaataagttaaggaaagtgatttatcgtgatgttattaatgcaaacgctttggtaatttttgagattgtattgatggtaattaaggtttcagataaccggtgtgatcggccaactattgggagaacaagtggttggctgatttgatatgtcaatgatggtatgcaattttctaatggtcggtggttagctagtaatatttcaccaagtagacattcacatgataatggttcatctatatttcatggtcttgatatgtcattgggaagcgaggagagcttggatagtgagtatatatatctgtcatctttcaagttgcttctttgttggctgcactcacccaccccggtcacatagttctctatgctcccgatgatagatttttacaggaattggattttattacttatgaaataaaaggtaacaaaatatcctgttcctctatttagaactcacaatgtagtttatattcgctcgttaacattaaacgagcgaatatgggttcaattacataatcacgtcagcggccgtatcattttcatcctcactcacagtaaaccacgggaaatattggctctgtcgcagccagccttttgcggtaataactcggatttcccgcccaatcggatcataaatatgcgtatcggcataggccccttttctggcgctgtcatcactcacatatcgccagtcgttgaggaaatagggctgataagttcgtatcgtctgtcccttattgtcatattcagtgcgtcccgtgaccgcccagcgcgttttggtatcttccatttttgtcaccagagaaccatcttggttacgttgccaagcttcgcctgcctcatgccgtacagatgcttgcaacaaacggccaaaaccatcactgaatgcgacttgctgatgaatttgctgcccagaatcgcggtcatagcgatccggggtcagcgtaaggttatggggaggtaaaccgatgctgttagttaacagattaaccaatggcgtactagcctgttgactttgcaaccaacggcggcgagccagtgcacaaatacgccaatcttccgtgataatccgtaaatcacgcagtgtcgtctgctcttcctgcgttaatgtgttgaaggtttcctgactgaatagtggcatccaactgtccggtgcatagaccagacactgcgcgacagggagtggtccggttagagcaatggcagtattgatatcgattggtggagagaacggcttttcttccggtgaggagtaacctgttttcacaccattttcgattccccagaaacgttgtgtgacagggcgtcctaatgcatccaaggttatgagatgcacattatcattaatatcagtcagttgcacaggtgtgagaaaacgccagtcataattggctaagacagtcaaaccagccgcgtcttgggtttgagtgatgacacagtagtgggtatcccattgcagcgtcgttttcccggttaacagggtgttacgttgtgcgacaggacgccaaaattgtgcctcagttccgtaatcggtatagccttgacgtgctacccagactttgttttcgccggtgcgtggaaacagataaggctcttgttgatatcctgcttgtgtcagaatgccgggtaattcatctggcgtgataccgccatcaaatgcggataacagagattctgttaataccgccgtttcggtaaaggcgattaaagcttgtcgtgtcggtatttccaatggcgcttggtttttcccatcggtatagaacgttctttgctgattaaggtattcgcgtggtttgtcatcggcaatcagactattttcagcacatagggcttccagatttaaaccatcaacaggcacctgtttggcatcgtaagtgaaggcatcactgcgtgtaccatccggtaatcccagcactctgagttcattaccggttagatggtgccaactggattgctggcaggttaatcgcaatagttgttgttgatcgtcataactgctggcaaatagcgtatccggtagtgtatcgggatacggattggttgttggttgattgcggcggggatattgcattgaaacctgtttcagaggttgcccgaattggtcgctggacagcgtaatatcctgattgcactgaggatcaccgataatacgttcatagtgataactacggttttccacgaccgaggcccaaagcaccggggaagcggtagtgccatcttgtaattggcgcacttgtggacgagattcagtcactgtataggggatattttgctgttcgctgtcatccagcccgtagagctcactacgcagtagctgaccttttagtgcccggttgaaccagtacagattatcatcattttccggtgtcgccggaacatctttgccctctttccagcgagtaaagcgtggcgtaaaaccggtgaacgcttgtttatcaccacgccaatacccggcagatagcgtattgtctacctccgggactccggtggcataccagtttttggtgagtgccggtggtgtgcgttccggggcattgccttgagcgagttgatggctgtctgtctgctcaacataaccaaagccacgaaattcccgttcacgtccatcccaagcgccgtgagcgtaacgtaacgtggtcactaatttattgccgctgatttcatcctcggtctctgtttgccacagagtatggaccgggaagggcaggtaacagaccggtgtttgtccggtcgccaaggctgcggctttgtcatccagccagaactgggaggagctacggtaatgcagggtgtgatgagcgcccatattgttgttcatttcactgagcaaccacggtttcgcattggtcagatcgcagcgccaatgatgtggcgccatatgcggtacgctcaggatcaggctgacagcccctaatccctgaacatcagccacttgtagctggcaagtatcatcaaaacgcaggccgtcaggaaaacggagtgtgaatggttttgcaaagctgttaccactttcattcttgaaaatctccagacggtcagtatgaacataaatcaaatcggcaggaccactgccatccagatcggccagatgaactcggtcgggattaaagttgtcggcagattggctgaatcccggcaatgtaattggctgaccaaaacggccatgtcccagatttggccagcaggtgacttgagttgcactaacttcaaccagatgtgcttggcccgaaccgagtacgtcactaaatgccactaacttacgggcatcggcacccggtaacggcagagtgatatcaccggattgcaccacatcccgcccttgggtaaaaccatcacggttattagcatacaagcgtacacttttggggccaatcagtactaaatcggacagcccggcccccattaaatcggcaagttgagcacggggatgagaatattctatcggcaaggcatctaatggtgtaaagcgtgtccagctaccatccgggtgttggctgtgatagccccttaaccccggtccggtgataacccagtccagttgcccgtcaccgttaatatccatcagtgaggcgttatcctgcaaagctggcgtgataggaaggagttgcattttcccccaggtgaccgcattcatctcttccccggcttgacgttgggcagatcgataccaccagccatttctatcctgatatagaacaccgggtacgccttctcctttcaggtcaagcagttgccagcgttgaatggcgttgaaatttgccagtacatccattgattgccagcgtgctttttgttctggctcaaaaggctggtaagccagctccagtggtggcagtgagatgacggtattgttgtcctcatgacctatccgacggacagaaacgagcgtgctgatcaccgcgttttcatcgtaatccagtatcagacgtgaaaccaacgcgggttcatcgtcccctttagcttgaccagacagggtttgtagacggtgaaacatcaggatttgacggcataagcgccgggtgcgcaattcaaaaccgtattcataacgggaaaaacggtcttggcggcaaagccagagacttgaggctttaaacggcggtatttcagataagctgtttttgcgttcaccgtaatcaaatactaaacagaacaaccagccagatttgagtgggtcatctccgttgagcgtgggaaaaacttcgctggcggtcaggttaccgtaatggaccgcttgcaggtagcgttggacggttgcgttcggatgggctgtgaactcgtcagtttcgcagtttgtttcatcttcggctcgatattgataataaatctgttcgccgtgggatgataccgaagcttccaacaaccattgcgctgtttggctaacattgagtggattgctgatacgtgcctgaggattttttcccagtaaatggacctgtccgtcggggctgtatatcagccagaaatcggttgtacctgttgttttgggttgccaatattccaaccagctaaagtggctttccaaacgggaacgataaccggtaacggtgaagatttcccccaaattgatgccctgcaatgaggattcactgcggatatcagcttgaccgttctcatttaatgctatgaccaacacttcaccttctggccccagaaaagtatcggtttcatcgtaattcggtacgccagtactggtgcggcgacgaattgtcataacgttgcagtcccaaccgagaccaaacgggctgttaccggctccactgctgtaattcaaggtgagcgatggggagtaaccacgcccggcagaaatgggtaatggcagggataaggcggccataccatccggcccagttggtgttaatgcttcacccataccggtaattgccccgccgcccttgggtaatgacagctcggcaacactgaatgtctgtgaattctgcatgaaaactccttacaggccccgattcggggcctgttttagtacgtttggacggttatttaatggtgtagcgaatatgcaaaatgatatcgttcagggtttttagcatagtggcttgtttacctttcttcggcatggatgcatttgggaaactcagtgtcagcgtgccttgatcaatggcgatgccttcgaatggcaggaatttgccatcgttgaaatcgagctggaattggccgctgtcattcataccgtgagaaactgctagcgcttcgcagccgttagctaatccggttttatcaccgtaagacaatattgcctgcacatcctgatatggccccagtagcgcgggcagggtgacactgatctgtttgatacgtcgaattttgccaagagatgtcgggtaatcctcacgaattttcaaatcagctaatgaaatggatgcctgcaaagaggttttagtgtccgtaccggcaccaaatgccaaattattattgtcactgccggcactgcctgagcctttactcaccagcttctcaatttcctgagccagggagaatggacctttatcttgtggcaatccagcataaacttcggctagcgacaccgtgcgttccacttctagtgcacgtttatcgcgtttcagatgggcatcttccatttgtgtcagacttagcatcaaggtttcacctgcaagcagaccggcataggttccttgccaggcacccggtttaatgaaacttgcagaggcatcattgatttcccaacggtaagcctgttctgccattaaacaacgcgcgacagccaaatcgtagaattggaagtaaatcgccgccaatcggccacgtagccagttgtacaacgcttgattgctgaacttacgttgcaggaaggccagctgagattgggtctgttcttgctgggttttcaggctggttttttgcaatacggcggcttcacggcgtactaccagtgatttaagttgggaatcgagttgtttcagttctgcttcggcattattacgttggatctcccactcctgacggcgacgacggtaggtttcggattggctaattttatccgcttcggtattcataacattagcggagaattccatcacataacctgttgcctcagcgatagctccccagcgactaccaccgccggcgaagccgaagatgttaggcaccaaatcagccgctgcgccagccagacgggatgcttgaactgccgtggtgagcccggctgcggacgctcgtagcatcatagcttggttttcaccggcgttgatgttttcatcatacaacttgctatagctatcaaagcgcgattgggctcccgctttggatttttccagcacggttttctcgacatccaattcttcaatggttttgtcctgaatgctcaggttagtcaatatcagctccgcggcctgattttgtaataacgcattgagtgcttccgcgtcctgacgctcgataatattttgtaacgtggagccgaactggatgagttggctaaccatgccgcgtgcattttccagcatgtgcgggaagcgccacagggacataaatgactctggtagtttgcctccactttgagaagtggcaacggcggcgctgagtaacgcttttggatctgccggtgtggcatagattggcagatatagcggttgaccgtcgatagagaggttatgacgcaggttgtatactctctgagctaatgtctgccagtagttcatcatcacttcattaatttgtggcaggaagagatcggtcagggtattggcgctgcgcaatgctaaaggtgctggtgtactctgccgcagagcaactattgagctggcgtgagcattttgagtagtaatatctgcggctctgtctagtcgaggattattccatgtcgtactcagcggtaggtaaggtttgtcgcccaatagatgcagcgcttgcatataccacatcttcgcttcgttaagcgtatcccgctccagttggcggtaagcctgatcgccgcgtgctatcaacagatcgagagtacgcataaaggttgagactttgtagtgcattggatcgtgttgtgctaccgcgtcaggatcgacggaatctaaaggatcactgttccaactggtgtcttccagtaacgggcgaacattccactggtagttctgaatctggccgtgaacaatataaccggatggactccagacatatttcagccagcggttggcttcatcaaagttttgttcatgcaacaaacgttgagcaaccagcatcggggtatagtagaacagttcccagaaataaagactgttagcgccgctgaaatccattggttcagttttttgattttctatgaaaataggatcacggtttttttcattacctttgggataataaccttgaaaattcgtaccatttttaaaccaaaactcgccaatttttattggattagtagaatattttacaaataaataaatccagctatcgttccctttattatccactggttttgtattgttactccgctcttttatggatatataagtttcagagagattaattaattgatttttatctgttagctcaccctgataaatgacatttgcttgatcaggttgtttttcactgtttcctaacataattttgatatttttgctgttgccatgaagacttgagttgtatattggtaatgttgcagtaaaattatcactccataaaacaggctcttggatattctgagtttccatactcagaattgtatcgattccggtggtggctcgtgcaaccaactggcgggcaaatagggtattcaggcgagtacgataggcttgccattgcatatattgcgcaccattttcattatggtgcagggtcagagcattatcggtactcaccttgcgagtaacaggaatactgaaactttcataacccagtttacgcccatcctccgccaatgcagtaaaggtgacatcaatactggctaagttattattaaaattcaaaccagtaccctctatttcgagggtattaaattgataatacatttcatcaaaactaggtgatggctgaacggaaacatctttatccgcggtaaaagttttctctttgctaccggcttttactgttacctgaatttttgccggggaaattgcagtgttgatctctactgcgttatagacatcagtagcaataatacggaatccattatttttgtcctccatatagagatattgtttaaataaaggttcttgattagaagtgtctataatatagccattattgctattggtaacttctgaatataggctttgtccccaattaggaagaaagacacttactttaccaatttggttatcccgataaaacagtaatctaccctgactattattagtggtgtttcctctatattgataaaccgggtatattaactttttatttgatgtccattgtgtattgacactcagattggtatagataataaatttatcacccaatttgccatatttttttatcaggttgcactgattacgagttcgctcatcagctccttcataggtaattcttaacttaggtgagatatggatttttaaatcacttgatgaggcttggtaacggataattgggatatctccgccatgcaccatactgaggttatattctcccctgccataactgttattgctatttaccgatgaagggatttcataattctctgcgtagcggttattcactcttctgacactattagtatcaaattgtttataactgttatcccgataaacattgctctgtcctaaggtcatatctttggatgccatgtcggcaaagatatatagcccttgcattgcagcagttttataactatctagtgtatcttgttggttataaaacatcaccagcaacgtatcttcaccctgataaccggcacaatagagcccgggcgctttattttttaccagttttagctcggatattttttcattgacatcaaaggtgattggcgtattccaagtgccgtcataacggatatgcgccagtttcagttcataacgataatccgtctcggtttgatagccatctttactatttcctgtctgtttggtgatctccttttgttccaaccagagcagatacaagcgggatttgtacatcacagggcggatagtgcttcggtaaggattaattgggcaatcaattttgtgccactcactccaagcgttagccgcgaatttaccgtcgctgaatttactgtgatcgacactacgccaatagtattcaccggcatcagtttcattaagtccgataaaataggtcagcccttgatcgttattaatattatcgtgatatgcactaataactttaagattagctacctgttcaaacgacgtcagataagacataaaggcgtcttcgaccgtatcggtatttaattggctttggctgacggattgcagtaatgcgtccatcattttggtttgtccgatgcgtatggtcggatcaatatagttttccgggtagtaaactaattgagaaacaccagcccaagtgctgtagcgtttattatatttgtcccagtcgataaagaattggcggctgataacccccgaatcggcattttcttccacattttccagcgcccgattgacgtacagttgaatgctggcaatagcttcggcgattcgggtggttttgattgcagcggaaacctgattatcaatcagcaagtattgatacaggtcatcacggcttttaatggccgccgctggtttggcgacttgacggatatagtaggtgcttaatgcggcactgcgggattcatccagaaaagcgtgtaatgtatccgcttgttgtgaattcaatccggcggttaatattcccgccgcgttttcccactgggtataggttggggttttttgcttagattgaatataatccagtccgactaaagcagaaacgccctgtggggcgacattcaattgttgtgcaacattaacccattgcaggatggtattgatcgatgtccaacaggagaaagcattttcttgtgttactggaggaagatgttgatgattttgtgcttgagtactggcttgcaacagcaaattagcatcaagattcatagcgtcagccagttgttctgccgttaaagtattagcttctaatgccgctaatacggaggaggctttttcgcctagcgcgttaacccaatccgcaaaacgcgtcagcatgatcaatgaaagcgcatcatgcgtaggggctgccccaatagaagtgccaaacatctctggttttgttacaaacaggcggaaggcgttttcgttaataccggtggaatggtaaaccatttccaattgtgccagagcttgacaatactgaacgatatgctcccgcatttctactgcttccgataaacccggcgtatactgagtattcaaccagtcccagaatttttctgctgtcattgcgccgtcgccgggctttaacttgtctgcccaaagcagcactgaatgagcgacattttccgatgataattgcaaggtagccgctatatagggtgccataacatgtagtaaatctgctttgtctttgtcaaaaccttgtaaaccgtggtaaacggtatctagcagattcttaatttcaggcgttagcgttttgttatagctggtggaggtcataataaacaactggaacacgctccacttctgtatatgtaaccagccggtaatggtattgagttttctgatcagagtagttaattgcttatcactgatagcggataaattagtttctccttcacccacagcaaccaataataaatccagctcatcaatggttaattgatggatttctgccagtaattttccaatatataaattggaaagatcctttaggttatttttaatctttccgtctttattattatggtcagtaattttgagcaggcggtagagagagacatcatcgatattaaatgctctcttaagtatggttttgcgaaaatcaccgttactacctggatttaaatcgatctcttcatctccggtagaaaaatattggccgttcagtaatggcgtattaaacaggcgatcaaactggctagtttgattattatatgaacgttgtgaaataagcgcatggcagagtattagggcagtttcagcatcaatagcataacgctgcatataatatttagtcagaaaaactttacctaatacttctgtgttgatatccagttgctgattaacactgcgcacaataccttccagaatcgtgggtgacaattctgttgctcgggatagacgaatcgccttattgagttttagcaggaaagagtattggttatattcctcaacggtaaattttgcggcggcataggcgtaattagtattaggaagtactcgtgtcaggccaatttcaaaaggttgactgatatcagtggtacttaatgtgatatttgcagagtattctatgttgacctgaggagcgccttcagttcgaataagctctcttttgtcatttaacttgatggataaataagtggcattccaaaaatctttgaatttataatctaaccgataattttcaccaccgaagggaaacagttccacgtccacttgataggcatttgttgtatattcgcgggtaatccgatataccttaaccgtgccatcactgctgttaactactggagtaataagctggttatgactatattcctgttgaccaaaattgctggctttaccaataaactggctaagttcttcatcacttaaattgtaataacgtttaagatattccggcatagccagtgaggccggttcgatattaccaaaatttttctcataaagttcctcagcattaccttcggtaatctcctccgtcaggatattaaacaactcaggtgagattgaggcgttaatacccaatagggaggcttgatgcattagcccggcaattgccggtgatgcatttaattgctcaagcccaggatcttgtagctggataacttcacgcacattttcataagcatcgtgataaggcgtcgcgccggaaggacggaaagtggagagcatttccatcactttagtatagttatccagcttagactcagttttaatactttccaacaatagctcattggataacgagagcgtggaaagttcggtatccatattttgttggctgagcgccattgatttgagatctgggcggcgggtatccagataataaacggagttgctggcgtgtaaattgcgagcctcacgataaagctcagtcaaataagcggcgggggagaacatggaggaaacggtacccggtgcgacatattgactggctctaccgctaaattggctgttatagcctatcagttcgacattaggggcgatgatggcaagatgtacggcattttgtaattgaggattcgcgcgcttaagaatacgggcttcatatagccgattatccttttgggcctgttgggcatcatgatataagtcgtgtgcttcggaccaagagaggtgagcagatacttgttggtgaaattcgttaaaagagctgtggctaatatctgtcaggcaattaaaaccacattggttttttaatacatcaggtatctcttttacaggcgaattcatatttattccttttaaatcataaagtaaatgaaacatccgtgttgcctttacatcatggatcaatcagagaatgattccgttccatcggaagaagagatgattaagtacaggctttgagaaatagctgagatatgcatagaaatagtttgcgaggtgtaaagaggcatatcttgatctctcagagaatcactatctcactgttttctttaaatagctgttgcaaaaaaagcagatgcaaaatttgcaactgattttctaatcagagttggctggaaatggcgctgtgttgttctcatgatgaactgtacgagggaagcgaagttcagtgataactaatataaattattaagtttatttaatcttaaaattgcaatcattacatgttgagcatgatagtgtttttcaactaattgaaatgtttaattaaagagctaatcacgcctatttttccgtaatgataatatgtcaaatttctttataattattattgtaacataaggtgggggtatatttattttgcaacaataataaaaattgtttgataactgctaagaataaagatgataaaactcaatctcagttaatgcatactttgatgttaaataatgcaaagaagaaaagtcgttgtaatgttttcttgttaatattccattctatttaggatggaatgattagttaaaataagaaggatatatgatgctattttgttcaaagaacttgaagtattttatggagtcagcgaaaagagagtcattcactttagcagcggatacgctttgtattactccctctcccttaagtaggatcatatatcaactggaacaacgtgtaggttgccaattatttgaaagattaccgggaaggactaaactgactgaggaagggatggccttatatcaggagctattgccgtgctatgagaggatgcagcgtgttgaggataactggcattatcggagaagcgagagattaacgaacgccggcaaacttattattgggaccagtggagaatatattaataaaatttcggcagtgataaaaagagcggtgcaacgttatcattatcgtgatatttacataaaaaacaattttctggttgatgattcagcaagaaaagaggcaatattttcttctttaatgaaagaagatataaccgtctatgtgacgactgaacattatcctgataacgataatattataagaatagatggaacttatcaggtgctgcgtcttgctatcgctaatgatattttgggatcggaaagtcatgctgatgatattatatccacattgcctttggctcagcataatagtgctttcttgaaacaatgtgacggctttattccactgaattgtctacctgagtaccaaaatttaactttgctaactgttcctgatttctctaatcggttggatttagtgagatcaggtatcgcgataagtttaatgacacctaatgaagcgatctgttctgctgatcttcataaaggtattacctttttgaattttaaatcgtatccaacaccatcagtgaaatattgtgcttatactcttagacacaaatataaagaaccattgaatttattgatttccgatttaattgtctaggattgatctgagatatttatcattgcattaattaaaccatttgtctggattaatgaaatattatcgtgattgaatgaaactttcttgaaattttaatgattggttgtgaaatcccctgaattaaagttcaggggatcttttattaattactattttatcaatttaatttgtactggatgatctaaagctgccggtataagtatcacgtacattcctatgagtaatcgctgatggtttaatatcttgtaataatacataggtatctctaccttgatgtctcattgaaacaacttcgaacggtgtttctctggggaatagtatttctgcttgccccgcttctggtccattggctcttattttcaatttttcaacaaagcttttccacgaatcatctaaatccatcttaaatattttctccgcattttcgttattatacttagattttgctgccacattgacacctgtattggttaaaaatgccattttgacatatcgagtttcactggtttcttttttatgcacaaaattcagaaaaccacgatgggccgatgttgataaataagcattatctgaaacgatatcaccaacgttgatgctatttccttcctgtggagagtgccagggggagggcttggaattatctatataggtcatcactcgataagttacccgtatttgtctatcttgcagggcagataatgaggaatctaaatctttcactatcgatgtaatacggttttctcttattgcagtattaatttgcgagctatccgtggtgtaatctttaattgggctagtatctacaccgggattgttggtcaataattgatgggcttcttgctctgtttgggtagcgatagctctttggcgtttgaaagtttgaggtttcgccatttttttataaacggcttcttccattcctgtaaaggaaccctgttttattatcgcttcttctgttctgttagccggagataatccctgaacatcaaattgtgtcaccggattatttctcaccatgcgatataaattcagcccatcaatggttccggccgggtccgcacttaaccatctgcccacccacggttggtaataacggtagccgtaataatacagcccggtagcatcccgctctttacctgaataacgaatggttttatagctggcttcggtttgattccttgctgcccacagagctgtaccgccaaatggataatattcttcctcactgataatttgtccttcgctatctaattcaagttggctggaaccgataagattatcgtagctgtaacgaagttgattgttgttgatatcttcgggttttccgctctcccaatgtaatacccggacttgcgcacgaccagctttaccgagtgtgataacttgcaaatattccgtggtagtactgccatgttgggttgtgcgtagttctagccccggcagataagtgactctttgctgttgcgcgatattctgagtttgttgttcattcacttttagctgtcgtgtgccgttgctatcgtagtgataccactcatttcctgcgctactgttgacttgtttcaattcgcctcgcggtgtccatattagaacttgaccggataataagttggtttgatggcctcccgaatcaaataaggcatcaacttgggttggatcttcggtcagtgtacttaatacggcacggttgctgtaattagaaaccgttatattcgtcgtgtagttattttgcgtggcaggtgaactatgctgaattttcatcaaattgccgccacggtcataactataggtgcgggtgtagttagtgtaggtgttgttatcagcaggtagcgcaggggaggggagtgggttatttggctgacctatattggccatttcacgtccggtggcactgataagctgatacagagaatcgtaggtatagctattctccgggatgactttttgattgcgccaaaagcgggtggcttccgcatcgttacggatattgatcacattgcctaccgggtcatattgatagcgtaggtcttgcaacaccttggcgtctgatggacggcgagtggtaatgccgataagccgctgagtttccggttcatagctgtattcggtaataatgccgttaccgtgctcttcgcgtaatttttgtccggcggcggagtaggtcagcgatttgataatcacttgttcggtctgaccttttaatgttagccagctcccttttagctgaccggccacatcataggcttgccgctgaatgttgcctttagcatcggtctgggtaagtaaaaccccggtggcatcggttttattttgggtggtatagacatcactactcagtttttgctgccagaggctctggtcttcacctgtccagtcggcatcttggttatcgacgagcggttgttgagattgtgataaaacggcgccggtcagggcaaggctgttgagttgagcgagtccggcggtatcgtaatgacgggtacactgaccaacaaggttgtactctttttcctgcggcgtattgccggcccagataagacgctcggttgttttctcttctgtctgtgcttgttcggtgattgcgagtaggcgaccgggtagggtgttatcttcataaaggtgattttggcggacaccggttgcgctgatggtcaataccgggcgaccttcaatatcgttgagggtaattgttcggccagcatcgacgctctctgttcgcaggatattgccggtcaaattatgctgccagataaaattcggttgtacggcgttgttagtctgcttagcatcatacaggcgaggatcaatgctttggttcaaatatccgccggcattatattgatggcgagtaatacgcggatcggtatttgcttctgcggtagcgcggtgaaaactaatattacggatagcgagtccacggttatcgtgaacactgacggtcggcgtatggtgataaagtttagggtcaatgtttttcatcgtcatttacttcctttgttatgttgaataatttgtgcaattgttattttgtctgcattacagtgaaccaatgttaaattcaatcctgctatataatagggataatttttctattcaggtaattgaaataacagtggcatgtaagatgatttttaataacaggccctgattagggcctgtggcaggtgatggttattcgaggatagtgtaacgaatgtgcagaataatgtcggtcagcatctgtaatatggttttttgtttactggtggcattggggaaacttagcgttaatgtccccttgtcattaatatcgattccttcaaacggcaggaatttgccatcgttgaaatcgagttggaattgaccattgtcattcaggccgtgggagaccgccaaggctttacaacctttagctaagccggtggcgtcaccaccataagacagaaccgcttgaacatcttgatagggtcccaatagtgacggtaaggagacactaatttgtttaatgcggcgtgttttgcctaactgcatctcttccgggtaatcatctttgagtttcaggtcttgcagggttagcgtcgcggatagcgtattgttggttaatttcaattgattaccgttattaccgacggaagtctctttatcttcttgtagcaacgcttcaattttatctttcaatgtaaagctttttccctctaaggattggtacacctgcgccagagaaaccgtgcgttccacttccagcgcacgttgttcttgtttcaggtgcgcatcttccatttgggccagattcaacattaaggtttctccggcaagcagaccggcataggttccttgccaggctcccggtttaataaagcgtgcagaggtatcattggtttcccaacggtaagcttgttctgccatcagacaacgggcgacgactaaatcgtaaaattggaagtaaatggcagctaaccgaccacgtaaccagttgtacagcgcttgattgctgaattttcgttgcaggaaagccagttgagcttgagtttgttcctgttgggttttcaggctggttttttgtaataccgccgcttcacggcgcactgttagtgattgaagttgagcatcgatctgtttcatctctgcttcggcattattacgctggatttcccactcctgacgacgacggcgccatatttcagattgcgagactttctccgcttcaattaacaaaccttctgcggcgatcccgccaccaatagcaatggcattggcaattgccccaaagcgtgttcccccgaccgcaaagccgtagatattgggtaccatctccagcgcggcggcagccatgtgcaagcctttcaatccgctggtaatactttgggaagctattcgcatatccagagcttgacgttcaccggcattgacatcttcatcgtataatttgctgtagttatcaaagcgcgattgtgccccggctttggatttttccagtacggttttttcagcatctatttcttcaatggttttgtcctgaatgcttagcgtcgttaatatcagctctttggcttgattttgcagcagagcatttagggcctcagcatcttggcgttcaataatattttgcaacgtggagccgaactgtgtgagttgagcgaccatgctgcgggcattttctaacatatgcgggaagtgccacagggacataaatggttgtggaagagagcctcctccctgagacgtagcaacggcggcgctgagtaacgctttcggatcggccggtgtggcatacatcggcagatagagcggttgaccatcaatagagagattatgacgcaagttatacaggcgcagttccagtttgttccagtagctcaacataacgtcgttgatttgtggcaggaaaagatcggtcagggtattagcggagcgcaataataatgctggtgtttgcgtgccttgtcgtagggtggttattgcgtaggaatatgctttttgtatggtcgtgtctgcggcattgtccagacgtggattattccatgcagaactcaacggcagatagggtttatcgcccaacaggtgcagtgcctgcatataccacattttggcttcgttcagcgtatcccgctccagttggcgataggcgtgatcgccacgagccatcagcagatcgagagtgcgcataaaggtggctactttgtagtgcattggatcgtgctgtgccaccgcatcgggatcaacggaatccagaggatcactgttccaactggtattttctaggaacgggcgtacattccagcgatagtttttaatttgaccacgaacaatataaccggatgggctccagacatatttcagccaacggttagtttcatcgaaattttgttcgtgtagcaaacgctgagcaaccagcatcggggtatagtagaacagttcccagaaatagaggctgttagcgccgctgaaatccattggttccgagaaagtttgtattactctggctgatgcaagccctgggaaggtcccattattataggtagtgtcgaatgtagcgggtttattattatcctctttaacgaatcgaatgaaatgtgtttctgctttttgataggcagcgtaaacatagagattgtttttattcccataagcgttatcaacacgaggtaagaataattttactgtcgtttgtgtaatatcgcttaatgttccctgataaataggaaaatgatcacctgctttaaaaatatcaccatacataatcttaaatgatttattagtgccgtggatatcagtattatatttatccataacgatttctatataagcccctatccccatcatcggttcctgaatattctgtgtttccatacttagaatcgtatcaatacccgtagtggcgcgttcaactaattggcgagcaaatagggtattaagacgaacgcgataggctccccattgcatatattgagcgccattcttgtcatgaaaaagcgttagagcattatcggttttaaccttttgaataacagggatattgaaaatttcataacccagtttgcgtccatcatctgccagtgcgataaaggtgacatcaatactggctgaattgttagtaaaattcagactagagccatctatttcgagagcattaaattggtaacacatttcttcaaagctaggtgatggttgaacggagacatctttattcgctgtaagagagtattctttgccagcgttgattatgatttgaaccttttcagaagagattcccgtgttgatatctgttgctccactaatatcggtggcaatctggccttctttatcttccatatagaaatatgctttaaatagatctatattattaatcgtatcgataatacaatcttggttactacttgtagtcgcggttatttcttctttagttgttgggaaccaagcccttatagtaccagttgtgttgctcctataaaacagcaaacatcctttgtcattattgcggtattgataaacaggatagataagtttttcatttttagagtgatttgggtttttatttatatttgtataaataataaatttatctcccagtttgccatatttcttcattagatcacattgaatacgttctcgtccttcttttccctcatgaattattcttaatttcggtgaaatcttgatttttaaatcacttgatgcaacttcatagttgataactatattaccgccatatacttggctcagattatattccccccaatcatggctgttgctatgattgatcaatgaagggatttcataatcctctgcatatcggttatttattcttatgacgctattagtatcagaattagtatcgaaatgtgtataaccgttatctcgataagagttgcattgctcattggtcatctctttggaggacatatcggagaaaatataaaatccttgcattggagcagttttataatcgtccaatttctctttttttctataaaacatgaccagtagtgtatcttccccttgataacctgcgcaatagagtccgggagcttgagattttgccagttctaatgctgatattttgctattcacatcaaaggctattggtgtattccaggtaccatcataacgaatatgagccaattttaattcatagtaatagtcagtaatgactttattatctttatcttgtttagctatttccttttgttccaaccaaatcagatataagcgggatttatagataactgggcgaatggtgctttggtagggattaattgcgcagtcaattttgtgccattcactccaggcattagcagcgaatttaccatcgttgaatttactgtgatcgacactgcgccagtaatattgattaatttctgttttgctgtgtccaataaagtaggtcagcccttggtcattattaacattgtcatgataagcactaatgacttccaaattagcgacttgctcaaacgaggtcaggtaagatttaaatgcatcttctaccgtatcggcatttaattggctctggctgacggattgcaatagcgtatccatcattttcgtttgtccgatacgcattgtcgggtcgatataattttcgggatagtaagctaattgtgaaacgccagcccaagtgctgtaacgtttattatatttatcccaatcgataaaaaattgacgagtaataacatcagaaatggcatgggtttctatattttccagcgcccggttgacgtacaattgaatactggcaatggcttcggcaatgcgtgtagtttttattgcagcagaaacttggttatcaatgagtaaatattggtataaatcgtcacggcttttaattgctgctgcccggttagcaatcttgctaatataatagttgcttaatgcagtactgcgagattcgtccagaaatgcgtgtagagtattcatttgttgagtatctaacccggcagttaataccatagctgcgttttcccattgggaataggtcggtgttttttgagacggttgtatataatccaatgctatcagggatgaaataccctgcggggagatattaaaatcatttgctacattggtccattgcagaataatatcgatggattgccaattggagaatgtattttctttagtaacctgcttataattttgcgcctgaatactggcttgttctaataaattagcatcaaggttcatggcattagccagttgttctgcggttaaaattttattttcaaaagcggttagaataggagaggctttttcacctagtgtgttaacccaattagcaaagcgggttaggatgattaatgttggtgcattatgggctggtgtcgctttatcaggttcatcagaaatgccaaaaatggttggttgttctatgaacaggcggaaagcgttttcattaataccggaagaacgataaatcattgttaattgtgccagacagtgacagtactgaataatttgttcctgcatttctggcggttttgataattctaaaattcccctattttgtaaccagtcccagaatttttctgttgttattttcttttcgcttggttttattttatcagcccagagaagaatagaatgtgcgacattttcagacggtaattgtagcgttgcggcaatataaggcgatatggtagtcaaaagatcttttttattttcatcaaagttttgtaaaccattgtagaccgtattgagtaagttttgaatttcaggcgttagcgttttgtcatagttggtggtggtcatcaaaaataactgatagacactccacttttgtgtacgcagccaattgcttaggctatcgagtctgtttatgagtttctccagttctttatcatcaatggtatataaatctctcttatcttcaccgatagtcatcaggagtaaatacagttcatcaatcgttaattggtgaatatctgccagtagtttagtcatatagagattggaaagattttttatattattagcaattttaccatctttattttcatgattagcaatatggagcaatcgataaagagaaatatcatcgacattaaaagcacgtttaagtactgttttgtgccagttatcggtatcggtactgttcagatttaagtcaatattggtgtcttcggtaacgaaacattgcccgttgagtggtggggtattaaataggcgatcaaattggctaggttgattacgataggaatattgtgaaatggaattattacatagtattaaggcagtttcagtatcaatgttgtatttctgcatatagtatttaactagaaagatttttcctaataccgatggattaatactctgttctggaatgatttcatctaattttacaaatggcaggtttacagatcgtgataataaaataattttattgatttttaataaatgtattttctgagtatttagttcattgtttggatattttcgaataaattggctgagctcttcatcactaagattataataacttttcagatattctggcattgccagccaggtaggatcaatatcgccaaaattctttttgtaaacatcctctgcattagcctcggtaatttcttcggtcagaatattaaataactctggcgagatagagttattaattcctaacaatgaagcttgatgcattaatccagcaaccgccggtgattgctgaaattgcttaagttgaggatcttgtaattggatagctttacgcacattttcataagcatcgtgataaggtattgtgccggaaggacggaaagtggataacattgccatcactttagtatcgttgtccagattaggctgattagctttaactccttccaacaaaatttcattagacagagaaagagtggaaagctcggtatccatattttgctgattgagcgtcattgattggaggtctgggcggcgttgatccagatgataaacggagtcactggcatgtaaattacgtgcttcacgatagagttcagttaaataagccgcgggggagaacatagaggaaaccgaacccggtgccacatattggctggctcggccaccaaattcattattatagccttgcaattcagcatgagggagggtaattccgaggtgtactgcattttgcaattgtgggttagcgcgtttgagaatacttgcttcatataattgattctctttttgttcctgttgtgcatcacgatataagcggttggtctctgaccaggagagatgatcagaaacttgctgacggaattcattaaaagaatagtgacaaatatcggtcagacaattaataccacattggctttgtaatacatcaggtatctctttcacgtatgagttcatgtttattccttttaaatcataaggtaaataaaacatccgtgtgatttctgtaccatcgatacaaatcgatacaataagagaagagagtgattccgttctataggaaatgaggatcatcactatgtcactgttttctttaaatagctgttgcaaaaaaagcagccgcaaaatttgcaattgttttttgatcaaatctggagggaataagctgttattgtttacatcatgattgatgagcaatgaaagaataatgaaattcagttatgatgagtgtaaattatatagtttatttaatgttatattgaaattcatttaatgggaatattgccgataattttgcaactaattgaaatgtaaaatatgaatgataatgagatatttatgtgcaataacagaatattaattttaattaaaataattatgctaatatagtggtaagttatatttattttataatcattatgcaagtgttaaataaattttcataatttaggtggtgaaatccaatatcaattaatgcatctcctaatgtaaaagaatgcaaagtagaaacatcgttgtcatgttctatggttaatattctatttctggaataaaaacaagagggtgtgtgatgatattttgttcaaagcaactaaagtattttatggaatcagcgaagaaagagtcattcacgttagcagcggatacactttgtattaccccctctccacttagcaggctcgtatatcaactggaacaacgtgtggggtgccaattattcgagcgactaccgggaaaaaccaagctcacagaagagggcagggcgttatatcaagagttgttgccatgttatgaaagaattcagaaagttgaggataactggaattgtcgtagaaattgcaaatcatcaagcagagataaactggttattggcaccagtggagaatatgttaataagatatctacggtcgtaaaaagagcggtgcaacgttatcattaccgcgatatttgtataatcaacaatttcctcattgatgatttaataagacaagatgcagtattttcttccttaatgaaagaggatataacggtttatgtgaccactgaatgttatccagataatgatgatatcatcaggatagatggtgcttatcaaaagttgtctcttgctgtatccaatgatattttagaaccagagagtcatgttgatgaaataatatatagttttcctttggttcagcataatagtgcctttttaaaacaatgcgataattttatgccattgaattatccacctgaataccaaaatttagcgttattaacgatccctgattttactaatagattggaactgataaaagcaggggtcgcgataagtttaatgacccccaatgaaatgcgctattctgcccatattgataaaggtataacatttctgaattttgaatcatatccagaaccatcggtaagatattgtgcttatgctctcagaaataaatataaagaaccattaaattcattaatttctgatttgatattttaggatgagagataaggtattgttattttaatgggttagatattgttttaattattttatattaaaagtcatcaagccatgagataaatatttcctcatggcttgtccctaattatttctggataaagtttattgtactgtcgtatttttttctataggcgtgacgaatttcagagaaagttattgcttcggcatattcattcggaccttctttccttctttttcctgttttccagggttgttctgattttaattgctcgatagtcaatttttccccgttatatccagccataacaaatctgaaatcaggtgatgctagttgttttataaaccaatccatacctaatttacttgtttgtctaaagaatgccgttgcaatagtattttttagccatgattggtctgctgctgataaggtgctttcaagttctcctgtatttcctgcggaagcaaatttcgttaatatatctctctgcctttgaatagtgaaatcgctaccatcactattttttaaaataaatgcatctaatttttggaatcgtttttggccggataacccactgaaaagactttttgaggggagaagattttttactttactttgaatatctaattttcctttattttctaccatatgaaaactccatgacgcagtgtaagcatattgttgttcataggcttcctgtttgattttatcagtagctgaactttcctctatacccattgctaccagatatttacttgagttagttcttatattttcctcattcaatttaggtggactgtcttctttaagattttgagaaattctaaaataatcagacagacttaattcacccatgataccaagcccagcattatattcatcgatggtaacaggattcttattagccgcgaatgccttccccatttctgatccgcggtgatgactgaaaccatatatcaccgtgtgttcgacatctttaatttcaggggctctaccatcagtatcatgatatttaattggattattcctcaccattcgatataaattcagcccatcgattgttcctgcgggatcggcgcttaaccatcgtcctacccaaggctgataatatcggtaaccgtaataatatagcccggtggcatcccgctctttgcctgaataacggatggttttataactggcttctgttttgttccttgccgcccataatgccgtgccaccatagggatagtactcttcttcactaataatttctcctttgctatctaattcaagctgactggaaccgataagattatcgtaactataacgcaactgattattgtcgatatcttccggtttaccgctctcccaatgtaatacgcgtacctgtgcccggcccgcttctcctacggtgataacttgcaaatcttcggttgtggtcgtattgtcttgcgttagacggagttccagactcggcaaataagttattcgttgtatttgagcgttgttgctggtccgttgttcgttgacttttaatatccttctcccgtcaccactataacgataccattcccgatcatcattggcgctcttgtcccgtttcaccaatgtcacttgttgtagttcaccgcgtggattccagttcaggttttgtcctgctatcaacgtgttctggtgcccgcctgcgtcaaataaagcatctacttgtgtcggatcttcggtcagtgtgctgagtactgcgcgattgctctggtgagaaaccgtgatgtttgtggtgtagttgttttgcgtcgccggtgaactgtgctggattttagtcagattgccgcctcggtcataagtataagtacgggtatagttggtgtaggtgttgttatcagaaggtagagccggggagggaaatgggtgactttgttgacctatattcgccatctcgcgcccggtggcgctgataagctgatacagggagtcgtagatataagtactttccggcaccactttttggttgtgccaaaagcgggtggcttccgcatcgttacggatactgatgacattgcctaccgggtcatactcatagcgtaagtcttgcaacactttggtgtctgacggattggtgtctaacgaacggcgggttttgataccgataagccgttgggtttcctgctcataactgtattcggtgataacaccattgccgtgttcctcgcgtaatttttgtccggcagcagaataggtcagggatttgataattacttgttccgtctgaccttttagtgttaacccgctcccgtttagctgcccggccacatcataggctagcctctgaatgttgcctttcgcatcggtctgagtcagtaaagcgccggtggcatcgaaggtgctcaggatggtgtagatgtcagcagccagcatgttttgccagccggtttcgttatcacctgtccagttagctgcttgagtgtcgagcaagagttggctggattgcgataaaacagtaccggtcagtgacgaactctccaatcgggtaactcccgccgtgtcatagtggcgcacgcactggccggcaaggttatggtctttctctgcttcggtattgccggcccaaatcaggcgctcggtggtacgggatgttttttcctctggtgtttgttcggtaacagataacagacggccgggcagggaagaagtttcatattgccgggtttgtatgacacctgttgccgtcaccgtcagcagcggacggccttcaatatcattcaaggtgacagtgcgacctgcatcaatgctctctgtacgtaggggattgccggtcagatcatactgccagagaaaattgggtttgatcgtactactggttttcttggcctcatataggcgtggatcgatgctttgacttaggtgtccgtgagtattgtattgatggcaggtaatacgggtatcggtatcaccgtttgcagtggtacggtgaaaatcgatgttacggattgtcagaccccggttgtcttggacattgacgacgggagtcttttgataaagtttgggatcaatgtttttcatgagttacctcgttgttgggttgttgtgtgtaatcctttctgcaatcgcaattgttgtctgtatgttagttttcttacgatagtcgatagtgtagtcgataattttgcaggttaactagagactgatggtttattgtggcagtggggccttattgcttccttccatgatcatgatgatacgtaatgaggcggcgccagagccagttcagtccggtacttcctgttgtgccgaataaacctgcaattgcaaaagtcatatagatactgccgccactttcaaaactcagcaatcctcctagtacaccggtaaagcaggagatgatgagttgacagaatacgttgatccaactccatttatattgtttgttttgcatatcaatgaggtaccttacgaggccgccccaggccgcaataaaaccaatgatcaaccagatgataagttgagtatctgacggtattatgagcaacacctttcacctccatctctgtttcccgcctgttaggcaggcgggattgatcaagttacatattcacctcattcacctcagcagccgtgtcattttcatcctcattgacagtaaaccaaggagtgaacaaggttcggcgtaaccaaccttttgcggtgataaccttgatttctcgaccaacgggatcatagacatgggtatctgcataagcttctttttcctgccgggcactgtcattgctaacgtatcgccagtcattgaggaaatagggctgataggtgcgtatcggctgtcccttattgtcatattccgttcgtccagtcactgcccaacgattctcagtatgcttgacacttatcatcagagaaccctctttattgcgttgccaagccatacctgcttcatgtcgggcagcggcttgcagtaagcgaccaaagccatcactgaatactacctgttgacggatctgttgctcaggatcgtgatcataacgatccgtagtcaatgtgaggctgtgagggggtaaatgggggccgttgtttaacaggctagtgagttgaggggttgccttttgactttgtgaccagtggcgataggccagtgtacatatgcgcccgtcttcggtgatgattcgggtattgtataacttttgccgatcttgctctgccagcctattgagggctttctgacttaatactggcatccagctttctggtgcgtaaacttgacactgtgctacagggagcggtttttttaactcaatagcggagttcacatcggacggtggagaaaacggtgctttttccggtgaagagtaaccggtcatcttgccgttttcagttccccaaaagcgcagtgtgattggccggcccagtgcatccagcatgataaggtgctgattgtcattgatatctgtgagttgcacaggggtcagaaaacgccagtcatatttggctgaggttgtcagcccagcagcatctcgggtttgtgtgacaacgcaataggttgcatcccaagtgagtgtaattttgcccgtgagttgggtgttgctctgtttttgcgggcgccagaactgtgcggctgtaccgtaatcggtataaccatgatgagctacccagattttatcttctccggtgcgaggaaatagataatttgtttgttggtatccggcttgttccagcgtcgttgacaattgagcagatgggatgctcccatcaaacgctgatagtgtggattgactaaataccgttgtctcggtaaaggcaactagcgcttgtcgcgttggcgtttgcaatggcgctgcatttttcccattggtataaatggtttttttctggccgagatattcacgcggtttattatccgcaatcaggctatctttaatactcagtagttccagatttaaaccaccagcaggtacatttttagcttcataagtgaagatatcactgcgggtactatccggtaatcctaacacccgaacggtattgtcagtcagatgatgccaactggattgttgataggtgagccgtaattggcgttgctgttcatcatagctgttggctaacaattcatcaggcagcgtatcaggatacggactgattgctggttgctttcggcgtggatactgtaccgaaacctgttttagcggttggccaaatagatcactggatagcgtaatatcttggctgcattgtgggtcgctggcgatacgctcgtaatgatagctgcggctttcaactacagatgaccaaagtaccgggtattggttatctgcctgctgtaatcgacgtacctgtggacgaaattcagtgacagtatagggaacgtgtttatttgtactgtcgtccaatccgtacagctcactacgtagcagttgacctttcagtgcccggtttagccaatactggctgttatcatcttccggtgttaacagaatatctttgccatcttgccaagtcgtaaagcgtggtgaaaaaccggcaaaagcctgattatcaccacgccaatactctgttgataatgtgttatctattaccggtagcccggtggcataccagtttttggtcatcgcgggtggggtgcgttctgacgcgttgccttgggccagttgatggctgtctgtctgctcaacataaccaaatccgcgaaattcccgttcacgcccatcccaagcgccacgagcataacgcagtgttgtgactaatttgttgccgctgatttcatccgctgtttccgtttgccatagggtgtgtaccgggaaggggagataacaaaccggtgtttgtccggcaaccagtgccgcggctttttcatccagccagaactgggaggaactgcggtaacgcaaggtgtggtgggctcccatattgttgttcatttcgctgagtaaccacggttttgcgctggttagatcacaacgccagtgatggggggtcatatgtggcacgctcagtatcaggctggcgacacctaacccttgtatatcggccacttgtaactgacaggtatggtcaaaacgcaagccttctgggaagcgcaatgtcatcggtgcggcaaaaccgttgccacttttattcaggaagatgtccagacggttggtgtgaacataaatcagatccgttgggccgctgccatccagatcggccagataaacttgagccgggttaaatatagcctctggctggctgaatcccggcagggtaatgggttgaccaaaacgtccatgccccagattaggccagcaggtgactttagttgcgctcacttcaaccagatgtgcctgaccggaacccaatacatcactaaacgccaccagcttacgcggatcggcacccggtactggcagcgtgacatcaccggattgcaccacatcttttcctttggcgaagccgtcacgagtattggcatataaacgcacactattagggccgatcagcactaaatcagagagcccggctcccattaaatcggcgagttgcgcacgtggatgagtatattccaccggcagagcattgagtggggtaaaacgtgtccaactgccatctggacgttgactatgatatccccgtaatcccggtccggtgataacccaatcaagttggccgtctccgttgatatccaccagcgaggcgttgctttgcaaggaagggataacagacaaaggctgtattttttcccaagtgacggtatctgagccaatttcacccagacgctgtgcggaacggtaccaccaagcgtttttatcctgatatagcaggccgggtaatccttcgccttttagatcgactagctgccagcgctgaatggcattgaagtttgccagcacatccatcggttgccagtcagtgttatgttgcggtgaaaaatcttgatacgccaattctaatggtggcagggtgacggcagtaccgtcttgctcatgtcctactcgacgaacgaataccagcgtgctggcgattgcgctttcgtcataattgagtatcaggcgtgaaaccagcgttggtccgttgtgttcttttatcttattatccagcgcttgcaggcagtgatacatcagtatctgacggcataaacggcgagtacgtaatgcaaagccatattcataacgggaaaaacggtcctgacgacaaagccagttacccgttgctgtaaatgctggtggcattttcaggttgttactgcgttcgccgtaatcaaataccaggtagaacaaccagtctgcttgtgatggggcgcgaccattcagaccgggtaacgtttcgctggctgtccggttgccgtaatacactatatgtaaataacgttgtgctgtggcctgtggatggagcgtaatttcattagtttcacaatctaagttatcttcggcccggtactgataataaatttgctcaccatgtggtgatacagaagcttccagcaaccattgtgctgtttgtgtcgtttgggatgggttgctgatccgtgcttgcggtgatttacccaataaatgtacctgcccatctgggctatatatcagccaaaaatctgttttgcctgttgtcttgggctgccaatattccaatcggctgaaatgactttccagacgggaacggtatccggtaacggtgaaggtagcgcctaggttgataccctgtaatgtcgattcatcacgcggttgatccgcgactaccagtacttcgccttccggcccaaggaaagtatcggtttcgttataatgggggacaccaaaatgggtgcggcggcggatggtcataacgttgcaatcccaacccagaccaaatggagtgttaccggcaccgctgttgtagtttaaggcgagtgacggggcataaccgcgcccggcagaaataggtaatggtagagatagcgcggccataccatccggtccggcgggggttaacgcttcccccattcccgtgatagcgcctcctcctttgggcaatgatagttctgtaatactaaaatcttgtgaattttgcatgaaagactccttgcaggccccatttaggggcctgttttagcacttaattgaaatcgttattggcgaatggtgtagcgaatatgcagaatgatgtcgcttagactctccagcatggttttttgtttgccttctttgcttccttcaccaattgcatttgggaagctcaatgtcagcgtacctttatcaatgtcgattccttcaaatggcaggaatttgccatcgttgaaatccagttggaactggccgctgtcattcatcccatgagaaaccgccaacgatttgcaactttcagccaatccagtgacatctccgctgtaagacagaatcgcctgcacatcctgatagggacctaacagtgctggcagggtgacactgatctgtttaatccggcgaacgttaccgactccactgttttctgggtaatcgtgacgaatttgtaagtcagctaacgaaatggatgcttgcagagacgtttgggcatttccggtaccaaacttcagggtgttatttccgctaccggcagtgactaatttattcttcatcagttctgcaattttctcagtcagggaaaattgacctttctctttatagatatttgccagtgaaacggtacgttctacttccagtacgcgttgctcctgtttcagatgcgcgtcttccatttgtgccagattcagcattaaggtttctcctgccagcaaaccggcatgggttccctgccaggcaccgggcttgataaagcgtgctgcggcatcgttagtctcccagcgataggccatttcagccatcaaacagcgagctactgttaaatcatagaactggaagtaaatggcggacagccgaccacgcagccagttgtacaaagcttgattgctgaacttatgttgtaggaaggtcagttgtgcatgagtctgttcctgttgcgttttcaggctggttttctgcaacacggcggcttcacggcgcactaccagcgaaccaagttgagcatcgatttgtttcagctctgtctcggcgttattacgctgaatttcccactcctgacgacgccgacggtaggcttcagactggctaattttatccgcttcggtgttcatgacactggcggaaaactccatgacattacctgtggcttgggcgattgccccccaatggctaccaccatcagcgaagccaaagatgttgggggccagatcaagtgcagcgcctgccagatgtgatgcttgaagggccgtagagatgccagcgacggaggctcgcaacgccattgcctgtttttcacctgcgttgatgtcttcattgtagaatttgctgtagctatcaaaacgtgattgggccccggcgcgggttttttctagcacagttttttcaacatccagctcttcaatggttttgtcctgtatgctgagattggtcaataccagttccgccgcctgattctgcaacagcgtgtttaatgcctccgcatcctgacgttcgataatattttgtaacgtggagccgaattgggtgagttgactgaccatactgcgggcgttttccagcatgtgtgggaaacgccaaactgatataaacgctgacggaagattatttccaccttgtgaactggcgacagcggcgctgagcagcgcttttggatcggctggtgttgcgaaaataggcaaatgtaaaggttgaccatcaatagagaggttatggcgcaggttatacagccgttgttccagtttctgccaatagctcagcatcacttcattgacctgtggcaggaaaagatctgtgttgcttccacctgtagactggccttgtcgtaaatctgctactgctttggcatgtgtcttttgtttctcaagatctgcggcctcttctagttctggatcattccatgttgaactgagtgataaatgaggtttatcacccaagagatgcaatgcttgcatataccacattttggcttcggcgagtgtgtcccgctccaattggcgataggcgtaatctccctgttcgatcaacagatcaagggtgcgcataaaggaagcgactttgtagtgcattggatcatattgcgctatggcatcgggatcaaatgaacccaacggatcatcgttccaactcgtgtcctcttgtaatgggcgaacattccaagtgtggggatactgcttttgaccattggcaatatggcctgatgggttccagacatatttcagccaacggttagcttcatcgaagttttgttcgtgcagcaaacgctgagcaatcaacatcggggtatagtagaacagttcccagaaataaagactgttcgcgccgttgaagtccattggttcgctactcacattatttaggacattgacactttcaaaatgggtcaaaatggagctggagtttattgttattattcctttattatctctaataaagtgaggacccgaccagctaccatctgatggcgattgcttgaaggtcatatagaccttggcgtggaaatcttgattcaatggaatatcatcaagaggaataaataatgtgatgcttatatttgtatcttttagctggcctgaatagataatatgtgagttattatcagagacatgtttgatatatagcttaaaccaacgttcatcaccatgagttgatgggttatagggaggtattacgaatgtagcatagaaacctttgcctaattgtagctcctgaatattttgagtttccatgctcaaaatagtgtcgatccccgcgttggcgcggctaattaatttacgggcaaacagcgtattaaggcgagtacgataggctccccattgcatatattgtgccccgcttgaattactgtgaagggataggacattattagtctccgattttttgataatacgaatactaaaatgttcttcgcctaggttacgttctttctgaccactttcaaatgcatcagcaaatgctgtaaaggtgatatcaatacttgcttcattatttttaaatactagtttggagacgtctatttctttgagaccattaaactggtaacacatttcttcgaagttgagtggtggtttaactgaaactttgtcgttcgctgtatatggctcactagttaattttccatcctccttcactgttttcactgtgattttaacgtttgaaggctgaatatttgtattaataaacattggccccgaaacatcagtgtcaataccgccgtggtcatccatgtagaaatattctttgaatggattgttgttactatgtttattatcaatataaccataattaccactaatgttaccgccggtggttatggacatttcttgagagccagagggaaggttagggagccaggctcttacaaaattagtggcactatcccgataaaatagaagtcttccttgactaagctggctggcatttccttcatattgataaacagggtagatgaattttttatttgacaaattattttggttaatgcctagcgtggtataaataataaatttatcttttggtttgccatattttttcatcagattgcactgattacgttgtcgaccttcatatccattatgaataattcttaactttggtgagatttggatttttgaattatcgctttggttgcgggtaattagaatactcccgccgtataccatactcagatagccttctccccaatcataaccattattattgtttaccgatgaagggatttcgtagctttctgcatagcggttattgactcttataacactattggttgcagtatgggtatcaagctgtttatgaatattaagtttataatcattaggattcatctcttcttgtgacatattggaagagatatataacccttgcatgggagcatttatataactcgcctgttcaggacctttttggtaaaacatcaccaataacttatctttgccttgataactcgcacaatagagccctaacactttattcgcttctagattgagatcagatatttttttatctacatcaaaggtaattggtgtattccaggtagcgtcataacgaatatgtgccaattttagttcataataatagcttgtggtggttttgcttccttgtttgtcagtttttatttctgatagagcttctacttttggtagagtttctccttctgatcgatgagttaccttcttttgttccagccaggtaatatacaggcgggattggaaaattaccgggcggatagtatcttcgtagggattaattgggcagtcaattttgtgccactcactccaggcattagcggggaatttaccttcgctgaatttattgtgatctacactgcgccaataatattgattcacttctgttttactgcgtccgataaaataggttaatccttggtcattattaatgttgtcatgataggcgctgatgacttctaaattagccacctgttcgaatgacgttagataagatttaaaggcatcttctacggtatcggtattcaattgactctggctaatggattgcagtagcgcatccatcatttttgtctggccgatccgcaatgttggctcaatgtaattttccgggtagtaaaggagcttagcaatgctggcccaggtgctgtagcgtttgttgtatttatcccagttggtgaagaatgaacggctggtgacacttgtgtcggtatcttcctccatatttttcaatgcgcggttaatatacagttggatactggcgatagcttccgcaatctccgtggttttgatagctgaggaaacttggttatcgattagtaggtattgatatagatcatcacggtctttaattaccgtatgttttctttcttctcgatctttttggttatgagaataaatagagtatgtacttaacgcagcactgcgagactcatctagaaatgcatgtagggtattggctttttgggtgttcagcccggaggttaatatcgcagcgacgttttcccattgggtatagtcagaggaggattctgtatttaatatttgcgttagtgctgaaacaccttgtggagagatgttcaattgatgtgagatgttaatccactgtaataggctgtcgatagatgaccagttggataaatcagtttctgcctgggtcttagcttgtgacagcagcttttcatcgagattcatggccttagccaatagctctgttgttaatgttttcttttcaaattcggtcagtacagaagaggcgtttttaccgagtgagttaacccagtcagcaaaacgcgttagtgacatgagtgttgatacatcatgtgctggtattgtctcggttgtttcagttgcctcaattgtttcggtttttttggttttaataacaaagtgttgtggctttgtcacaaacagacgtaaggtattttcgttaaggccgatggaacggtaaatcagcgctagttgtgctagacactggcaatactggaccacgagttcagcttgtttttggaattctggttgagcggtaacgggatttattcgcaaccagttccataatttttccgctgtcatgtttcctgtaccgggttctagtttatctgcccaggtgagtatgaaatatgccgcatgttcagatggtaattgtaaagcagcggcgatataaggagatatggcttttaatagctcttctttggtttttgcctttttcttgtcaaagttttgcagaccgttatatacagtatccagtaagttttggatttctggtgtcagggttttgtcatagttggtggtggtcatcacaaataactgatagacactccacttctgtgtacgtagccagcgagtgacggcatagagtttatcaatcagggtgaccagatcagtattattgatggtagataagttggttttttcttcacctatggtaattagtagtaaacttaactcatcaatagttaactgatggatatctgccagtaattttgtccgatagagatgagaaagattctctatatcattagttatcatttcggtagtattgaccggattggtaacctttagtagtcgatttaatgaaatatcatcgaggttaaaagcaagtttaagtacagttttgtttctgtcattggtattgctgaggtttaaattaatctctggagtgccattggtggaaaaaccctgaccatttagttttggggaattaaataaacgatcaaactggcttggatgaccgtcattgctatgttgtgaaatggttgctttgcacagtattaatgcagtttcagcatcaataccgtagcgttgcatatagtatttaatacagaagattttttttaacacttcttcattgatgttgaattctggactgatactgcggaggattccacttaataccgttggtgataagtttatagctttgaatagataaataaatttattaattttcaacagagcacgataatcagtcttttcgatagtttgttgtgtattagtagtatgcgatgcaggctcagtaattgttatttcttcttctgggagaagtatagttcttattttaaggaagtcgctaaactcttcatcactcagattgtaataacttttcagatattccagtttttttgtcagagaaggtttaatatcaccaaaattattattataaagagtttcagtagtagacccggtaatctcttttgtcagaatagtaaataactctggtgaaacggaagcattaatatccaacagggaagcttgatacttcaattgagagagtgttgtttctgggaatacacttaattgctcaaatactggagcctgtaattgaataatcttacgtacactttcataagcatcgtgatatggcattgagccagaagggcggaaggttgataacttttccatcacttcagcgtggctgtccaaattagtctgagtcttaatactgttcagtaacatgttattagacagagaaagtgtggaaatctccgtatccatatttttctggctgagtaccaatgattttagatctgggcgacgtgtatccagatgataaatggaaccttcagcatgtaaatttcgtgcctgacgataaagttcagtcagataagccgcaggagaaaacatggaggaaattgcgccaggggctgcatactgactggcgcggttgccaaatcggctattgtaaccttgctggtcggcatgaggagttgtcagggcaagatgtaccgcactttgtaattgagggtttgcgcgtttcagaatacgggcttcatgcagcaggttatccttttgcatctgctgtgcttcaagatataagctctgggtctgtgaccatgagagtttgtccttcacttttttgcgaagttcgtcaaaagagagatggcaaatatcggttagattaaaatctgctcctaacgcttgttgatattcgggcttgagtgtgttcatgcttattccttttaaatattgagtcaataaaacatttatgctggcttgcatctcgtggagataaataaggttatttatctccatccaaataaaggcaacacaggtaacgtttgatagcggtctgaaattaggttgaaaataatggtcaaataaaaacaccatttaactatcaactatttcgtaacgttattatttatttaaatggctgttgtgatgcaataacaaaaattataattacatcataagtaatataattagttaacaataaccaaatgaaatagttgcatttgttacatattgcatgctacgaaaaagaagagggttgatattttatagtaggtaatcggactcacgagaaaaggaaatatctctgttataacgagcgctagacaggtaagaaagcagatggtgaatgtggtgaaaggttcaggcccccgtttaggggcctgtttttagtgtttgattgagatggttactggcggatggtgtagcgaatatgcagaataatatcgctcaatgcctgcaacatggcttgctgtttgctagtcgcattcgggaaattgagtgttaatgtgccagtatcgttaatcgctatcccttcaaatggcagcaacttaccattgttaaaatccaactggaattgaccactatcattaattccatgagaaatcgccagtgatttacagctttcagctaatccggtttcacttcctccgtaggacaaaatggcttgtacatcttggtatggtcctaacagggctggcagggtgacactgatctgtttaatacgtcgaatgttgcctacgccgttgccttctgggtagtcactatgcagtgacagatctgacagtgagattttggcactgagttggtcgttttctaatgtaacagggggatggtcaacggggtcagttgtaccacctgctagcagggcagaaatacgtgttgccaaattaaacgatttttctggcagtgctccatagaattgcgtcagtgaaatggtccgttctacttccagagcgcgttgatcccacctcaaataggcatcttccatttgtgccagattcagcatcaaggtttcaccagcgagtagaccagcatgtgtcccttgccaggcaccgggtttgataaagtttgcggcggtatcattagtttcccaacgataagccatttcggccattagacaacgagctacggccaaatcgtaaaattggaaataaatagccgctagccgaccacgtagccagtggtacaacgtttgattactgaatttacgttgcaggaaagtcaattgtgcctgagtttgttcctgctgggtttttaggctggttttctgcaacactgccgcttcacggcgtattgccagcgattgaagttgggcgtcgatttgttttatctctgcttcggcattgttacgctggatttcccactcctgatggcggcggcgataggcttcggactggctgattttatccgcttcggtgttcatcacactggcagagaattccatgacattacctgtcgcttcggcaatagccccccaacggctgccgccatcagcgaaaccaaaaatgttgggtgccagatcaagggcagcaccggccagacgcgatgcttgcagggcggtgctgaggccagcaatggaggcatgcaatgccatcactcggttttcacccgcattgatattttcatcgtatagctttttgtagctgtcaaagcgtgattgcgccccggctttggatttttccaatacgattttttccgcatccaactcttcgatggttttgtcttgtatgctgagattggtcaatatcagttctgcggcttgattctgcaatagcgtgtttaaggcttccgcatcctgacgttcgataatattttgtagcgtggaaccgaactgtgttagctgactcaccataccgcgcgcgttttccagcatctgtgggaaacgccacagagacataaatggtgtcggtaacttgtttccgccttgtgcgctggcaacagtagcgctaagcaacgcttttggatctgctggagtagcataaatagaaagatgtagcggttgaccgtcgatagagaggttgttgcgcaggttatacagccgttgttccagtttctgccaatagttttgcatcacttcgttgacctgtggcaagaaaagatctgtcgggttgctgtgacggctaatatcaccttgtcgcaaggcggtcattgcctgggcgtgttcctcctgtttttccgttctggcagcatcacctaaactcggtttacaccactctgaactgaacgatagatgaggtttatcgcctaacagatgcagtgcttgcatataccacatcttggcttcgttgagtgtgtcccgctctaactgacgataggcgtaatctccacgatccagcaacagatcaagggtgcgcataaaagtaacgactttatagtgcattggatcgtattgcgcgatagcatcaggatcgacggaattcagtggatcgtcgttccaacgggtatcttctaataatgggcggacattccagcggtagtgctgaatttgaccatgttcaatataaccggatgggttccagacatatttcagccaacggttggcttcatcgaagttttgctcgtgtagtaaacgttgagcaatcagcatcggggcatagtagaatagttcccaaaaatagaggctattagctccgttgaaatccattggttccgtgtgctcggatagaacagaaacattagaaaagccttggtattttttgactggtgatcgttcgcctccatgcgtcatagctgagtcatgagcagtatcattaatgagtacaaatttttgctgagtttcgttgaaatagaagaaagctggttcccaccaatcttgataaaatttttgcttgtattgcacacctattctgacgccttccatagtatagaggtcttttttataggggacaaatagggtaatgctggtttcattatccgttagtgttccttggtaatataacctcattgaattatcgccattaatattacctatgtgaattttaaaccagcgttcattgccgtgtatgttttggtcgtatttaggaagagtaaaattagcgaaaaaccctgcctttaattggggttcggatagtttctgagtttccatacttaaaatagtatcgatcccagacatggcgcgactgactaatttacgggcaaacagggtattaaggcggatacgataggctccccactgcatatactgcgctccgtttgtgtcgtggtaaagggtcaggatattatggtcacttatctctattgatgaagagacttcatatcggttattcaccttaataataccgttgacgccaatatcggtatcaaactggttacgaatgttaggtatgtaatctccgagattgatatcttcgggtaatatatttgaggagatatatagcccttttatgggcgcatctgttgtgtatttatccagtgcatcctgtttttgataaaatatgactaacaacttattgtcttggtgatttgcacagtagaaccctggttgttttcttattagctctgattctaatcgatccaactccttctgaatatcctgttggttcaattccagctgtttttcccttacgcttatctctgtcgttgattgtccctgttcattcaactctctctcccattgcgccagttgttttttccgttgttctattagcggtggcaatagttgtaatgattttagtggcgctataggttgtggtggacttactggatttagtggtgcgattggttttagtcgctctacttcttcctgctgttctttcagtttatcttctaattgcttttggtactcttgcaattggtccaataaatctgatgttttcaaaacagcggatattttgtcatgtacttctaaggttattggtgtattccaggtccagtcataacggatatgtgctagttttagttcataataataacattcgatggtttgattattatctgtctgtttagcaattttcttttgttccagccagatcagatacaggcgagattggaaaattaccgggcggatagtgtctttatagggatttattggacagtcaattttgtaccactcactccaggcgttagcaggaaacttaccgtcattgaatttattgtgatccacgctacgccaataatattgattcacttctgttttattgtgtccgataaagtaggttaatccctgattgctattgatgtcgtcatgataggcactgacaatttccagattagccacctgttcgaacgacgtcagataagacataaaggcgtcttctaccgtatcggtatttaattgactctggctgatggattgcagcaacgtatccatcatttttgttcgcccgatacatattgtcggatcgatgtaattctcagggtagtaaatgagcttagcaatgctggcccaagtgctgtagcgtttattgtatttatcccaatcggtaaagaatggtcggttggcaacctgcgaaactgcgtttccctccatgtttttcagtgcccggctaatatacagttggatgctggcgatagcttccgcaattggggtggttttgatggcggcggaaacttgattatcaatcaataaatactggtacagatcatcacggtttttaatttttgcctctgcgttagcgaccttatgaatgtagtactcgcttaatgcagtactgcgagattcatccagaaaggtgtgcagggtgttggcctgttgggtatcgagcccggcggttaatatggccgctattttttcccattggctatagtcagtggaaggttctatgtctaatacttgcgccaatgtagaaacatcttgtggagagatatttaattgacgcgcgatattcacccattgttggatggtgtcgagagatgcccagttggagaaattaacttgtacatgagtactggcttgttccagtagatttttatcaagactcatggcatcagccaactgtttggtctctaatgttcccttttcaaattcggtcagaacagaagaggctttttcacccagagagttaacccagtcagcaaaacgcgtcagttttatcagtgataatgcattgtgtgttgacgttgctcctgcggtaagaccaaagtgttgtggttttgtgacaaacagacgtaaggtactttcgctaaggccgatggaatgataaatcagcgctagttgtgccaggcattgacaatattggacggcttgttcttctgtctcagtagttgattgttctggggtgtgttgagattgcaaccatttccagaatttttttgctgtcattgcaccagagccgggttttaattgatctgcccaagtgagcatatagtaagcgctattttcagatggtaattgcagagcggcggcgatatagggagagatcttcaacagaagatttgcctcgttttcgctgttaaggtcttgcaaaccattgtagacagcatctagcagattttggatttctggcgtcagggttttgttatagtcggtggtggtcatcataaacaacaggcacttattccatttctgtgcatgcaaccactgggtaacgttataaagtttgtcaatcagaacagacagattatcatcactgatcccagataaactggttgatccttcacctatggcaattagcagtaaattcagctcgttaacagttaattgatggacatctgctagtaatttggtcagatagagataagaaatattagttaagttattgattatttttccatttccattgtcacgatgagtcatcttgagtaattgataaagtgatatatcatcgacattaaaagcacgtttaagtacctctttttgccggctatcagcactgttttggcttaaatcaatctcttcatctgaagcgtagaaatcccggctatttaatggtggggtattaaataaacgattaaattgattggggctagggctatagtagtcttctgaaattggtgcattgcacagtatcaatgcagtttcagcatcaatattgtaacgttgcatatagtatttaacgcgaaatattttctttaatatctctgtattgatgtctggtatgtcattcagctcatcgtatatagtagggttatattctaggatgacttccataggttgggatattgcgtgataagttctactagaggcaatttttttaaggatttctggtgccatgtctgtggctcgtgacacaagaataatcttattaagcttgaggagataatattgagcgggttgttggctgccatattttgaattcatttcattatgtattcgttcaatatttcgttgattaatagactgattaatttcttcatcagttaagttataatagatttttagatattctaacgttgccattaaagagggctgaatatcgtcaaagttttttttatagagtcttttaatttcctcttcgtcatctgtaattttatccgttaggatattaaatagttctggagagatggaaatattaatccccaatagggaagtttggtatttcagtttagcgatggttgtttctggggaagtattgaattgctcaaataccggagcctgtaactgaataaccttacgtacattttcgtaagcatcgtgatatggcagagagcccgaagagtgaaaggttgatagcgctttcatcacatgagtatggccttgctgtccggcctgcgtctgaatcccttccagcaacactttattggacagagaaagtgtagaaatttcatcatccatattttgctgactgagtatcagtgattttagatccgggcggcgtttatccagatgataaatggagctttctgcgtgtaaatcccgtgcctgacggtaaagttcagtcagataagcagcgggagagaacatggaagcaactgcgtcgggggcgacatactggctggcacggccaccaaatttactgttataaccttgttgatcggcatgaggtgtggttaaagcaagatgtaccgcattttgtaattgaggattagcacgtttgaggatactcgcttcatgcagttggttagctttttgttcctgttgtgtcatttcagggcgttctggcgtgactgtgctcatgtttattccttttaaatgttaaataaggtagtgatgctgccttgcgtatcatggatacaataaaaaagttattgatattcattaaaataaggcagcaaatatgacatctgataacgggttgaaataggctgaaagtaacgggtagataaaacggtatcattcggtcattaactatttcataacgttattatctattgtttctctaaatgcctgtgacaatgcaataacaaaatttataatcacgtaaataataattaagtttattgatgataaacttatgaaataattgctattgttttgaatggtgttttatggaaagtaaagtgattaatattttgtgatgagcgaaggggataattagaaaagatattttttctttttggttattattttaataattatcgcgactatatattagtctgtataaggtagtgatttttaatgaatatagttattatttttttaaactatttttagcatgataatatatccaattaatttgaaagtgcaggattcgagtggattaggtatatatacaagaaacctccgaaaaaaaaggaatattgtgatttggctcaatatatagataatactcatatacacatagttgtatttatgtcatgttgatattgaatttttttcacaatggggttttggaggagcgtgatcaatttaaagaaaaagcaatattgctaaatatgatttagctattgcaaaaaccaatgcgaccggggtgagtgagtgcagccaacaaagaagcaacttgaaagataacgggtatacacacatatgaatatgagataacaaatgaatactaactggatgaatgaagaggcttcaaatttattcgatcaatatgatgattatttggaggacagacttgggtacacgccgttgattgagaaccttaaggagagcttggggcaaaacgtatcggttcttgattacggttgtggtggtgggaaagtgtcacgtcggctaattgctggcggcataaagacggtaacgggagtagatatttcacaaaccatggtggacaaagccgccagcaatatcaatcgtggcaatagttcttatcatcaaattacaactgatgtccttaacttcaatgataatactttcgacgcagctatatgctgttacgtgttcgtcactaacagtgaaaagtctgatcttttgaaaatcgctaaggaagttcacaggacattaaaacctggtggtattttttatgtattggatactaatccagattcttgtgggattaaattcaaatcttttatgagtggcgatctaaataaaaaatacaatgatggagaaatcaagccagtgtatttagagctgtcaaatggaactatttttaagatttcagatacgcattggcataaagatacatattaccaaatcttgaacgaggccgggttcaaaactattgagctttttgaacacaatgacgcggatgctttagaggatactggagatctacgatgttacccaccttttgccatgttcaaagcgactaaattctagatgctctataccctatggatttcaagatgcatcgcgacggcaagggagcgaatccccgggagcatagataactatgtgaccggggtgagcgagcggtattttctcctttggcgaggttttttattttagctcaagtcatattttttgtttttcattcatcatactgtttagccacggcacggtgaccgccatgatgatcgcgacaatgaaggtagcaatcccaattttgccgaatacgctggtatagattggcaatgtttgcaatgggtcagtaatccctttcggtgcggcggtaagggctgcgacatagccgccgagtaaggaggaagttgcttgagttaaataccacattcccagaataaaacccatcaggtactgaggaacaagggctgcaatcattgccaggcccaatgcactgatcatcaattcaccgacaccttggaacagataaaccagaacaataaaccaaggggaggtcaaaccttgttcatctgcaaaccacaaaccggcagcggcggcagtgaggaaacctaaagagcacaggaacataccaacagcaaacttagctggcattgtgaggtctttacctttagcgccccagtgagtgtataaggcggcgagtatcgggctggcaacgacgatccagaatgggttaagcgcttggaaactgaccgggttaatgtcaaaaccaagcaactggtggtgaacgttatggatggcaaagaaattgagagaagttggcatctgtgcatacaggatgaagaacacaatagcttgaagcatcaaaatgaaagccacaaacattttgttacggctagctttatcctgttttaatgcttcacggaagaagataaacaccacgatagcagatagggtaatcagcacaatattggctattttcacgttgtgcatcagccatgcacagacgtaaaccatcacaacacttcctgctaataccaggaataggtttttatagttgattggttgatggtcgggttcagaaccaatattacgtactgtattgcgacataaaatatagactaacaaagcaataatcagcccaataccacaaatattgtaggtaacggcataactaaatttttccgcaataacaggcgcgagagcgagtgagaacagcgagccgaggttgattgacatgtaaaacagcgtaaaagccccatccagacgaggatctttggggggatagcatttagacagcaggctggccgggttggctttgaacaggccgttaccaacggcgatcgttcccaatgcgtagaaaattaaatcagggtgtaggatagaaagtccagtcataaaatagccaattgccaggacaatggcacccaacacaatggttcgtttagttcctagtaagtggtcacctacataaccgccaatcgagatcaaaccataaaccagcgcggcaaatgcaccgaaggtaataaacgcttgttcttgggaaaatcccaatttctgtacaaaatagacagcaagaacgccttgtacaccgtagtagccgaatcgctcccaaagctcgacgaagaaaatcataaagaacggcttgggttgttgtaataaaccgatggatgcgggtttattcatagttgattgcctctgatgagtcattatttatatgttggaatacatacgaaaatgcctgatagttgacatttttataacatgatgtatcgctaacgtggtgtttttttgaactttgtccaaattatcatgaactcggtaggttattatatggttaaaatgtgttcttggtggttgatcacactaatataaaaattaatatcaaatttagaactatattcataaagtgaatattaaaaatgatcaggaaaaaagttgaatataccctatggatttcaagatggatcgcgacggcaagggagtgaatccccgggagcatagcaaactatgtgaccgaggtgagcgagtgcagccaacaaagaggcaacttgaaagatgacgggtatagatatatgcgttgacaacagaacactattcaggccctgaatggcctgaatagtggaagaacaatcactgccagatggagaagcagttaaactgtagcggtttcaatttccaacataactggacggaaattccgcttaaaatagatgaggccgtggccttgttcgctcaccgtgatatgtttaatctgaaccagatacacgttatgcgttcccacttcttgaacctgttcaatttcaccttcaaggctggcgagggtgccggttaacaccggttgacctaatattcctttctgccagatattccagcgaaagcgctcttccatgctgactccggtcataccggcaaagtgacgtgccatcaattcttgttcgtggtttaaaatattgacacacaggcggccattttcctgaaaaacggtattcatagcactgctacggttaatgcataccatcagcgtgggtggcgtatcggtgattgagcatactgcggtggccgtgatgccgcagcatccgccatgaccatcggtggtgacgatattcaccgctgctgacagactcgccatcgcatctctgaaacgcaggcgatgttcattttctaaggacatattggcctcctgctaccgattatttcagcagcttatctaactggttaatatcgttattgttgtataaatgtggcctccgccagccatgctgatcataatcagcaaggcagcgatcaaccatatccatcatttttttcatattgccagagccatgagcatgacgcagacattgcatacgaatttcatcctgacttccggcgtagttgatttcgtacaactcgtgacggccaccgaattcactaccaatggcatcccacatcagttttaaaatcttaatgcgctcaacgtgatcgattccgttggaaccccgaacataccgggccagatatttatcaatttctggattattcatatcacgtacactagatggtagataaattaggccgctggtgacgttactttcaataatattcttaattttagtgtaagccgttggtgccataacgcgataagtttgtattgcttgggtatccggcatataagcgccgcctttccacggtttggcttctgcccacatcgcatcactcagtgaccaaaacaggttacgccaggcaaccacttcacccaggtcagcctgaacaccacggaattctatcacgccggtacattccaggctcctttgtagcagggcagtaataaaatccagtttcactgctagtcgtacacaagcctgtaatgggaacagattggcgaaacctgcttgaactgcccagttgcgtgagcggtcaaaatcacggtaaatcaggacattttcccaaggaataaggaccttatccatcaccagaatcgcatcgttttcatcgaaacggctggataagggataatcgaatggggaacctgttacacctgctaccaattcataggagccgcgggagatcagtttcatgccttccgcatccattggcgtgacaaacatcaaagcgaaatcagggttatctcccattatttgtgcggagccaaaaccaataaagttatagtgagtcagtgctgagttagttgctaccacttttgcgccgctgacgatgataccggcatcagtctctttttctagcttaatatagacatcgcgtgtctgatcgatgggtttatggcgatcgatggggggattgataatggcatggttaaagtaaacgcctgtttcctgaatacgtttgtaccagacacgggcgttatcagcgaactggccataatattcagggaatgcgccgagtgcgttaccgaaggccgctttatagtcaggtgtacggcccatccagccataggtttgacgtgaccactcagcaatcgcatcacgttgttggcgcagatcatccgcactggtagcaaagcggaagaatttgtgagtatacccgccactgccggtatcggtattccagcacagggtatcatgggtttccggggcgtgcagggcatcgtacaactgaccaattgaagcagcagaattgcggaatgcgggatgtgtagtgacatcttttacgcgttcgccataaatgtaaatttcgcggccatcctgaaggcttttcaagtactcttcaccggtgaaaggacgttttttgtcggcgcgaaaatcttctggtttcatatctacctcacagtcgtcataaaaagcgcctgtcttgatataatataatcaatattggcacggaaatgttaatttagtgtttgttttgtgtttcttaattgaatcctcagaacggcttttcttgaatagatttttggaaggttcgctggtacttttcgttgggaaatggtgatttgtgactaaagtgtgatctaggcgatgtttttgtggctaagaggcatctatttcttatcgagtttggtgaccgtttggacggtcaccattagtgagatgagaataattgaacgggattatgttcagactcaaaagcttttatattatttagttacgtaggttgtttctatatttagcaatactattacgaacatcttcacgatattttttatattcagatttatttgaaatataatccatttcgtatggtgataatccttcactttctaaatgtcctattaataacggtgatgcttttttctgtaattcatcccattctcctctggcttgatttaaaaaactattctcgttgtaagtctctgttattaatacaggttttggtgtggttttaacttttactccatcaatctttttcataaccgttgtccgcgattttattaacttccacgtatcatcaggagtatttttttctttcaagctcttatattcagaatattcaggttctgtagttttttcagcctgatattcagcgataatttgtgatttatcaacttttccgtaaacaagtccctcctgagatcctttagcaaagttaattgctgggtgtttattaggatcaagatttatttcgctatgagatgaagtagcttgttcctgaagcattctaatctgatcgcttttatttgttagatcaaaagatcggttatttttctttattcggaatttaacaactctaccgctaccacttgaggctgcccagcttgctgcaactttcaaagaacgactataggagatccaactggatttgacctttgcacttgtccctgctctaacatgagcataagcagaaatatttagatttgctccttctggaggacgaaggccatgtatagagggatgctcatcagatctcaaggcacgataaccaatgctactgtcttcgctttctgattccccctctgaatcaggatgacggggtctcactcgtggaggcgccaaaccatcattatcatataaagtaattggattatttctcaccatccggtacagattcagaccatccacagttcccgccggatcggcgcttaaccacctgcctacccacggctgataatagcgatagccgtagtagtagagtccggtagcatctcgctctttgcttgagtaatgaagggttttatagctggcttctgtttggtttcttgccgcccacagcgctgtaccgccaaatggataatactcttcctgactgataatttgtccttcgttatccagttcaagttgactggaaccaatcaaattatcatagctataacggagctgattattgctgataccggctggtggtgtagttgcccagtgcagaacccgtacttgggcgtgaccggcggcacctacggtaataacatgcagatcttctgatgtagttgtgccattttgcgttgtacgtagttctaatccgggaagataagtcactcgttgttgctgtgtgctgttaccggtctgctgttcattgacttttaactgtctcatgccgtcgttgccgtagcgataccattctcgatcactggtattctcccggtttaccggcgttacttgttgcagttccccccgtgcattccagctcagatcttgtcccggtagtagttttttctgatggccgccagcatcgaacaatgtatctacctgtgtcggatcagtcgtcagtgaattcagcactgcgtggttactgcgattcgagactgtgatatccgtggtgtagttattttggctagcgggtgaactgtgccgaatttgagccagattgccaccacggtcgtaatcataagtgcgggtatagttggtatatgtgttgttatcagtaggaagagggatcggagaaggacgctggttgctttgctggccgatattagccatctctcgtcctgttgcactaataagctgatacagggaatcgtaagtatagacattctccggcaccactttctgattgcgccagaagcgagtggcttctgcatcattacgaatactgatgatgttcccgaccggatcatgttcatagcgtagatcttgtaacaccttgttatctgattgacggcgagtggtggtaccgatcaatcgtagggtttccggttcatagcggtattcagtgatagcgccattaccgtgttcttcacgcagtttctggcctgcggcggaataggtcagggatttgataatgacttgctcactttggtttttcaatgtcagccagctaccttttaactgacctgctacattgtaagccagacgctgtatgttgctttttgcatcggtttgggttagcaaagcgccggtagcatcaaaggtgctttgtgttgtataaatttcgctgctgagtttggtctgccagagggggtcattgttacctgtccagtctgcttgctgaccatcggccaataactgacgagattgagataagatattttctgtcaatgacaggcttttcagttgcgtcactcctgctgtgtcgtagtggcgtacgtactggccggcaaggttatgatctttctccgtttgtgtattacctgcccaaataaaatgctcagtaacgaggggtatcttttctccggcagcttgttcacttacggacaatagacggccgggcagggtgttagcttcatattgtcgggtctgaatggcattggttgcggttacaattaatacttgacggccttcaatatcattaagggcgacggtacggccggcatcggcactttctgttcgcaaagtatcgccggtgagattgtgttgccagagaaaattgggatttattgagttgtcgagctgtttggcgtcatatagacgtgggtcaatgctttgactcaagtgtcctcggacatcatattggtggcgggtaatacgagtatccgtatcccctcccgcgacagagcggtgaaagtcgatgttacgaatggtcaggccacggttatcgtagacgctaatcgtgggcgtatgttgataaagttttggatcaatgtttttcatgatttacctcttggttgtattgaggattttggttgttgcagtttggcctgcgttcaaccgaatgggcacttgggcatattctttatccagaaaatagcgatgagtcctgttatcaatatgccagcccatactaattaataatacatcctgaatattgatctaaagtcaattgaaaatatggggcatctttcattttctggtttctttttcatgtatccaaatattggttattggtaaattcagctcaatatttacttgttttaaatgttatttccctccggcgaggtcaataaaatttccggttacatatgaggcttcatccgacagcaaccagacgatagcctgtgccacttctttcggttgtccaccgcgtttcattggtaaggaatttttcacccgatcaactcgatttggttcgccgccatcagcgtgcatatcggtatagatgaatccaggacgaacggcattgacccgaattccctgatctgccacttccagagacaggccaatagtcaaagtatcgatcgctccttttgatgcggcataatctatatattcgtgcggtgatcccagtcgagatgctgcggatgaaacattgacaattgatccaccgtgaccaccatgccggaaggacattcttttaaccgcttcccgtgcacagagaaaactgcctatgacattggtggcaaaaatatcatgcaagcgatgagcggttaattgttcaatcgatgcttgtggtttaagtattccggcgttatttaccaaacctgtgatgcatccgagttcggtatcaattctttggaagagttctacaacttgtttttcatcagcgacatcgacctgaatggcgatagctttaccgccgatattatggatgatttctatgacttcctgagcttgctcttgattggtgtggtagccaatgcaaatgtggtgtcctttctttgccagataaaaagctgttgcgcgaccaatgccacgtgatccgccggtaattaatgtaattttttgcataatattctcatttaaagttttacattaagaaatcaaatatcaaactaaccagtattattaaagaaaaactgaatgaaaagcaaatttttgcatatggcatggggatatttgtaatgttttcattgttatttttataattatttttagtcagaggttaaaatatctttaataacatcatatttttttgttttcattgagggtgaaatgaatttttttgtgtgttattaatgtttttgaagtttggttaataaatgactcctttaaagtataatatataattaattacattcaaaagcgttttttatttgaatattttatggattaaaggttgatttatttatcctttttatggtgtttgtttatatataccctatggatttcaagatgcatcgcggcggcaagggagcgaatccccgggagcatagataactatgtgaccggggtgagtgagtgcagccaacaaagaagcaacttgaaagatgacgggtataactttgcattatttttgatgactgattcagatgttctaatacggcggaaatagtttccaataacattggcggtgcaatattaatataatttccttgcagctcattgaatattttttgaaatgattcaaaatcattcctatcaatagcatttgtcagcttatctatgtactgcaattgttctcttatttccattatatttaacctctttatttcttcatttaagaataatttaattactcatcttgttcagtatgctcgtttaaataatcttgtgacttgtttgacacatgcgttaaaaactcaagtgctgtcataccccacccttcggggagaacgtcagcatcatggtaatgataatcaaatgtgctctctacatcttcagaagagtcaataaggtcgttgatttcttctattaacccttttctcattccctgagatgcgtcattaagaaaatcattgataacatcatcaagctcgggacctgatattatatcgaagtcctgattaaagtaagcatgcattaaaatatctagaaatggatattgtccggtcattaaattagccctttggaaatgctgttaatatataaaatggtttaccattgtattcagaataccttagaacaaccctgactttatataacttttctacatatttagatcctttagtaacaccaaaaccaatagaggtacttgaaatgtattcaataggtgcagtggttccttctccggatgatgggatacgtgttgttcccttgtcattaaatgttgaagcgagtaaataaaaatttcattctcatgaccgtgctggtaattatttcctatggagtttaaggagccgcagccagcggagattagcccctgttttttgcctttcaatgttaagtaaatgatatttgccatactggttgttcctctaatgtgctttttttatcctgctgtagggtgtgtgcaaaaagcaatcaaaaatttataaatttaagataatttacatttgtaagaggaataatttgataaaaccaaaatgcttagaaatagggtatcaaagtattaagagcaacgtaaaaatctgaactgttaaggtatcgtattagtaataatcgcatagcgtgagttgacattcaggtaacacccagtggccgctacccgaataatttgaaactatcctaaacgcatacgattaatctgataaaaaatcgccacatccagtatcctagcaaagcaaatgtaatgacattaagagaaagtgatttgaatcttttcttcacggttgcataaattaagggggacataatcagtaaacatgttggagcaaatacatcacgattatcatctatcagctctctgtaaacagtacagagattatctatatcctgaccaccgatataatgctcttcttctaagtatgacatcatatatataaataacgcacaaaagatagcataagtgatatttaaaactatagctgatttgctcattctgaaattctcatgattatatgaagtctatgacatcaaaaggtgggaacccgaatttacctgccatatagtaaggattttgcatatgctgtgtttccttttcttaaataaatttatacccgttatccttcaagttgcctctttgttggctgcacttgctcaccccggtcacatagttatctatgctcccggggattcactcccttgccgccgcgatgcatcttgaaatccatagggtatatttttatcggcactccggttgccatcatttatccttcaaaagttccagtgagttacagagtctcagtatattcagaattttaattcttggaagagattttgtaataaaactgagtcagtttagcacgaattaatagcacgaggtttgctgaacaggcagaataaaatgccgggcttggtataattagcagggatatttatttttcgtgaatatttctttctcgccaataactaggtgagcagccaactaatcgattaaagaagcgggcaaaataggcgggatctttaaatccaagctgataagcaacttcaaatactgggcaatcactgaataataatagccgtttggcttcacgcagttgacgatcgaagatgagtcgttttggtggacgattggtaaaccgacggcacatatcttttaaccgcgattctgtaatatctaacttatgagcatattccggtacggaaagatgatgatgataatgattgtctattaattgattaaagcgctgaaacaatttaatttctcctcgcacgccattaaccgggtgatcatcaagaggaatattgcgcaataactgggtaaatatggcttgtgctaaaaatgtcagcgattgctctcgaccaataaagttattcgatgattcgcgggcgattaacgcccaatagtgattaaaagcggccaattcttccggtttatcgacgacggataagcaaatagccggaatatcaagaatatctttattagctggatagagtgattccaataacggtaatatcagatcttgccgtacggtaaggacatatccgtcactgtcatcttgagtgaaaaaagcgtgaggaacggagggcggtgtcaggataaacagcggtgcctgtacagaatagtgttgagcatctaactgtaattcaatatggccggtgatcaaaaaatgaagttggaagaaaccatcgtgacgatgagcttgcatattacgaccaaaaaatgctgccatccgaccaaaggtttgatagtgcacatcatcagtgccttgggtttcatcataatccttgctgatatcaatattggcaatgataggctcagtcatgatggtttttcctttttattgaaaattacggcgctgttctctgtctggcgtgtttcattgggatcaaccagataatggctgcgccaacgaccagcaatccggcaacgaaatagagcccggtattaaagcttcctgtctgatctttcagccagccgattaataacgggctgagtgctgaacctatgttgcctgtagcgctaataaccgcaatgccgatcgctcttgcacgtaaactgatagcttgatccggcgttgtccagaagaccgccattgcggtaaatgaaccggttgaagccataataatcccaatgagctgaatgacactgtggttggtcaatgaggtcaatatccagcccacggcggcgaacagatagggtagagctgtatgcattttacgttcttgtaaccggtctgaacggcgactccagtaaatcatgccgatgatggtacaaaactgaggaatagcggtcaggataccgatcatgatgttactgctgccctgattgaagctttgcacaatctgtggcgtccagatattaatcgcactcaaggtattggttaaacagaagtaagccagggtatacatcagcatgatcggcgcgaaaatttcacgccatatactgggtttttgcattgcctgatgagttgatgagcttgctggttgaaccagagcgggctggtcgttatccatcatctcttgtaagcattttttgtcctcatctgtcagccagttagcgcgtttgggtgaatcatcaagatagaaccaaacgacaattcccagtagtaccgaaggaaaaccttccagcaggaataaccattgccagccgtgaaggttcatgaggccatccatttccagaatataaccggaagccagagaaccaaacgccatcgtcaccggcattgccaccataaacagtgcgttggcacgggcgcgatagtaagccgggaaccaataagtcagatataacaggatgcccggcacgaaacctgcttcggcgataccgaccagcatccgcaagatatacagactggttggtccggtagcgaacatggtggcagtggaggagatcccccagagcaccataatcgtggctatccagcgtcgcgctccgacaatgcttagcataatgttgctaggaataccgaaaatgacataagtgacatagaacagcgttgccgccagaccgaacatggttgcgttcagtccaagatctttacccattgtcaggccggcaaacccgatattaattcgatccagaaacgaaaatacaaataagacgaacaggaaaataatcaggcgacggaatagcttattaatgacggattgctgttgtgccgtcagcggtttatgttgaccaaccggaagatccggctgttgcacaacagttgatgaatcgctcattatcattttccttacttactgttttatgtgtattacgttgtctaggaaattaaatgcttgttgagtaaatcaattattaaattgtggttgctgagattaataaacaccggataaaggtgctaccggcggctctttatccgcgataaatcgtgctgccagcgcttccgctgtccgagccaataaagttgtatcaatacccacagcaacgaatagagcaccgagtttcaggtagtgctcggcaacattgggtgcggacatcagaatgcccggcgctttacccgccgctttgatttgagcgatggcttgctcaattgcgtctttcacttcaggatgttgcggattattggtaaagcccatatcggaactgagatccgccggaccgataaaggcaccatccacaccgtctactttgaggatctccggcaggttacggagtgcttcacgggtttctacctgaaccagaacgcagatttcatcgttggcacgatgcagataatcaggaattctgttccagtgggaagctcttgccagagcgctacccacaccacggatacccgccggtggataacgggttgcccgaaccgcttcgtaagcctgttcggcgttttgtatcatggggattaataacgtttgggcaccgatatccagtagttgtttaatgatgaccagatcattccagggcggacgcacaatgggatgacttggataaggggcgatagcttgcaactggcttagaatcgtctgaatatcgttcggtgcatgttcgccatcaataagtagccagtcgaaaccggctccggccactaattcagcactgtaggggttacaaagccccaaccatagaccgatttgtggctggcctgcttttaatgcctgtttaaatttattggttaaccgatccatatttttcctcgttaaacaaaacggcaactgatagcaccgagggggccataatccacatggaaggtatcccctttattggctggaaccgggcgggtaaaagagccgctgagaatgatttgtcctgcctcaagctgaacaccatgtggggccagtttgtttgccaaccatgcgacaccgttagctggatgattaagtaccgccgccgcgacaccggattcttcaatcacgccattgcgatagagcagggcgctgatccagcgcagatcaaactgatcgggcttaatcggacggccgcccataatgacgccgccgttggcggcattgtcagaaatcgtatcgaacactttgcgtgggcgcttagtttccggatcgatgttatggcaacgggcgtcgatcaattccaacgctggaatgatgtaatcggtcgcgttgtaaacatcaaacagtgtgcagttcgggccacacaaaggttttgccagaatgaatgctagctcgacctcaatacggggcacaataaagcgatcacatggaatatcactgccatcagggaaaaacatatcgtccagcaaagcgccataatctggctcactgatttgtgagctggcttgcatggcttttgaggtcaggccaattttatggcctttgagtacccgaccttcggcaattttcaactccacccagtgacgctgaatagcataagcatcatcgatggtgatttcagggtaatccaatgagatctggcgtatttgttcacggcttttttctgcctgatgcagacgatgtgcaacctgtgatacgacttctttctgtaacatgcggttaaactcctgtgtcttctatgccaccaaagcagagatatttcacttccagataatcttcgataccgtaacgagaaccttcacgtcccaggcccgattgtttaatgccgccgaatggggcggcttcattagagattaaaccttcattgatcccgaccataccgctttccagcgcttctgccacacggtagatccggccgatatcgcgggaataaaaataagcggctagaccaaattcagtctcatttgccagatggatggcttctgcttcatcacggaatttgaacaggggagcaatagggccgaatgtttcttcttgggagataagcatggatttattgacatcagccagtacggtaggttcgaagaacagaccgcccagagcgtgtggtttacccccggccaatatgcgtgcaccgtgggaaatggcgtcactgatgtgttcctcgactttatcgacggcggcttgattgatcagggggccttgttgtgatttagcgtcgctagccgggccaacctgcaactgattaacggcttgtgccagacgttcggcgaaggtgtcataaatggtttcctgtaccaaaattcggttagcgcaaacacaggtttgaccgctgttgcggaatttagctatcaatgctccctgtacagcggcatcaatattagcatcatcaaaaacgataaatggcgcattgccacccaattccaatgatagctttttcacggtgtcggcactttgtgccatcaagagcttaccgacacgggttgagccagtaaaagagagtttgcgaacaatcgggctttgggtcatagctccgccgatggctttcgcatcgatgccggtcaccacattgaatacgccagcgggaataccggcttgttccgctagcgcagccagagccagagcggaaagtggggtttccgaggcgggttttaggatcaccgtgcagcctgctgccagagcagggccaaccttgcgggtgatcatggcattggggaagttccacggtgtgatggccgccacaacgccaataggttgtttgatcgtgacaatccggcgaccaggcaatgggcttggaatggtttcaccgtaggtgcgtttaccctcttccgcaaaccactcgatgaagctggcaccataagcgatttcgcccatcgcttctgtctgtgacttcccttgctcccggctcaacaattcagccagtgccggttgatttgccatcattaactgaaaccaacgttgcagaatctggctgcgttgtttggctgtcatggttctccaggctggtagggcttgttgagcggctgcaattgcgcgttctgtttcggccgcacccatattactgacgtgggcaatcacttcaccatttgctgggttagtcaccttaaaagttgcttgattgtcggcatcaacccactgcccgttgatataagcttgttgacgcagtaattcggtatttacattatttgtcatgatttttttctcctaaagacacttgtgtgaggggttttcgccggtagaaagtggctagctgctggcataaccaactcaatccagcacaaacagtcattacaagggccatagcaaaaggggtttcatcttgtagtaaagagacggcaacactggcgaatgccgccatagcaaattgtgcggaaatagcgagcgcactggcgctgccggcaagttgaccgcgatgttgaagtaataaagagaggctgttagtaccaatggcattaaccagcgagataaacagtacgaccaaaatgacgatcaccgtcagactttgctgataaaagataaccaataagatgccgaacagtaattgagcactggtttggataaataacagacgggaaacatcgtagacttttagtaaacggacattgagcagcactactgccatcatgcctagcgcattacaggcgaacagtaagccgtagtaattcgccggaacctgaaaatagttgatatagacgaaaggggaaccactgataaatgcgaacatggcggcacaagtgaatgccaatgtgccgatagttgccatagcttcaccgtcagtcagtaacttgccgtaatttttaaacgcagtgataagttttccgccgttatgctgggcgggtagcgtttctggcaagaaaaatagtaataatattccactgatacaaccgaacaggcccaatagcgtaaatatggcctgccaattgaaataagttaacagtaagccacccagtaatggcgcgataagcggcgctatcatggtcaccaaagtcatgagtgatagcacgcgtggtaattcctgcgggccgtagatatcacgggcgatcgctcggcccatgaccaccgcggcaccgctgccaaatgcctgtaatgcgcgcagtaaaatcagttgttcaacttgtgtcaccaaggtacacaacgcactggcaacgacgaataatgcgataccgctgagcagcagttttctgcgccctaaatggtcgctcagtgggccgtataacagcatgccaatacagaaaccggcgaaaaatgcgcctaaagtatgttgcatctgcccttgtgttgcctgtaattgccttgccatttccggcaaggctggcaggtacatatcaatcgacagcggcccgaaggccactagcgcacctaataaagggattaaccaacgaggaggatgctgatgaaagggcttcggcatcactactccttacgaaacaaggcgtggacgttgttttgtttgtagttcaataccgggtctaattcttccatcgtaaaagagagggcaaggtaacgttgtgccatcagcgaggcaaaatgttgtttgatcagaggaaacagtatctcaccaacctgttgacggctttcaaggctgcgtcctgcaccgatttttagtgtcatatggacgaaggcgtaatcatgttgaccatcggccatttgccaagtatccagccagatggcacggctgcgtatgccgcctaatggaaaaatgccggtatctgccagcgcctgatgcactttggcaaacaactccggcaaattggcttgttcgcggatattttccgtacattcagcataaaaatgtggcataggttgctcctcatcaggggatcgcgggtttatcggtgatgtaatcaggtagtggaaatacggcgttgacttgtccggtgccggaactggcaaacagttcagtcagaaattccactttaccgtcatatttatcccaaccgagtagacctaataacatcaccgtgtcgtgcatattgccttcgccataacaataatctgcatattccggcagcatcttgcagaactctttgaatttgccctctttccaaagttgaaccacccgatgatccatctgttcatcaaattctcgggtgtagctattcatgccctcttcggcgcgttgatcatcaataaaacggtgagaaagggaaccgctggcgaataccgcaacggtgccatcatatttctcaatcgctgtcagaattgcctctccaagacgacggctatcttcaaaagcatggacagtgcagaatgcggagactgagataactttaaaatgtcggtcactgttcatgtaacgcatcggtaccagcgtgccgtactccagtttcaggcttgggatttcatgcgcctgagcacgcacgccgacattgcgtgcctcttctgcgatcatttgtcccaattcagggttaccgtcatattcataactcatatcccggatgaagtggggtaattcattactggtgtaaatgccggagaaatggtcggcacaattgatgtgataggcactattcaccagccagtgcgtatcaaacacaataatggtatcgacacccatttcgcgacaacggcgactgatctctttgtgaccatcaatagctccctgacggcaaccgtgatgcttccccggtagttcagacagatacatggatggcacatgtgtaattttggctgctaacgctaacttacccataaaatcctcatttgatatcaggacggcgaaccggaattcgccgtggttaacgctgacggaacggttataccccccaacgtgggattggatgatcccccatcgagatacagacgtttttcatctcagcaaacacttcaaaactgtattcaccgccttcacggccggtgccggaggctttcacgccgccgaatggttgacgcaggtcacggacgttctgggtgttgacaaataccatgccggcttcaatattgcgggccagccgcaagactttgctgacatcctgcgtccagaggtaagaagccagaccgtactccacgtcatttgccaggcgcagaccttctgcttcatctttgaatggcagcaggcaggcgacagggccgaagatctcctcctgagcaacccgcatacggttatcaacatccgccagcaccgttgggcgcaggaaatggccgtcttttaggtgtgccggtaaatcaatcggtttgtctggtccacctgccagcagcgttgcaccttcctctattcccagacggatgtaaccggagactttctcccaatgcggcttgctgataagtgcaccgatctgggtagttggatcttgtggatcacccacccgcaaacgattagcgcgttcagcaaaacgcttaataaactcagggtagatactttgctgaatgaaaatgcgtgaaccggcggtacaacgttcaccattgatagagaaaatggtgaacagcgcggcatccagtgcgcgctcaatatccgcatcttcgaagatcagaaccggagatttaccccctagctccattgaatattttttcaggccggcatttttcataatctgacgaccggttgctgtgccgccggtaaacgaaaccgcgcgtacatcgtgatgtttcaccagcgcgtcacccgcggtagcaccatatccctgaaccacattcagcacacccgcagggatacccgcttctagtgccaattcgcctaaacggttggcggttaatggggagagctctgacattttcagcactgcggtgttacctagtgctaaacagggggcaactttccaggtggcggtcataaatggcacgttccacggagaaatcagtgcacaaacaccgacgggttgcaccaaggtgtagttgagcatcttgtcatcaacgggataggtacggccgttcatttgctgacaaatctcagcaaagaagttgaaattgtgagaagcgcgagggatcaagacattttgtgtctgatgaatgggcagaccggtatctttggtttccattgccgcgatttcaggcacattctcatcgatcaattcacccaaacggcgcatcaagcgtgcacgctctttcatcggcagatcagcccatttgggaaaggctgcctttgcggcggcaacggcttgatcaacctcttcttgaccgccggaagcgacttcggccagcacttcgccggtagccgggtttgtggtttcaaaataggttttactgctgatgtttttgccgttgatccaatggctaatgacggtcattacagactctcctcatactcttgctggctgacaatacggttaaccagacgcccaacaccttcaacttcaacaataacttcatctcccggtaccacatcggataatccttttggcgtgccggtggcgatcatgtctcccggttgcagcgtcatgaagtcgcttagataagcgatcaaaaatggaatattgaagatcagatcagcggttgtaccgcgttgacgcaattcaccgttaacccaagtgcttaatgtcagattatgcggatcggggacatcttctttatcgacgaaccacggaccgatgggggtcagtgtatcgcggctttttacccggagattaggacgatagtagttttccagatagtcacggattgcgtaatcgttacagacggtgtacccggcaacgtaatccatcgcgtgttcttgagtcactttgtgggcggttttgccgatgataaccaccagctcggcttcataatgcatatattccacatgatcagggcgaacggaaacctgacgatgaccggttagcgtattggcggccttgataaaaaccagaggttcttcggggggcttaaattccagctcagtggcgtgatcagcataatttaaaccgagggcaaacagggtaccgtttgcgggtggcagccattgaacggattcgctgttgattttactgccatcaggcaggcagacattttcctgttcatcgacagtaacaatcaaatcgcgaccttgatagtgaactcttgcgtgtttcatgctttttctcccacttgcacaacctgattttccagtgatggaaaacctgctgcccgaataacaactttgtcgcccggtttgatagccacgcgttggtgtggcgttccaagcaggatcacgtccccctctttgagggttgcgaaatcactcaatgctgcaactaattccgtggctgaacgcaccagatcggctgttgaccagcgatcgacttcctgaccattgatttcggtaatgatatctaacgcatcaatggattcaggatgagtcatctggcctatggggcaaaaaccatcgcgacacttagcttttattgccggacgatagaaagcggtttcaggcaggctgacttcattagctaatgcataacctgcgatatattcggccgcattttcaatggcaactttgcgggcggttttacctattattaatgccagcgttgcaccgctttgaacctcttcacctaccgggtggggaattgcttcaccggaggtgataacggtattgcggggtttaatgaaccatactggtgttttaggcagagtgttataaggtgtttgctgaaatgagccatgccagaaatctacctggctctggtggttgagggctacggcgaagacagtgcctttcattaacgattcctcataaacttaaacgggcggttttaagatgcatttattaatatattaataagctacggggcgcgttgttgcaatatgttaatgtgtttgttaattttaattgtgatctcagtaacaatatctccactaaatttgttttttatcattattaatcaagatattaatcttttttcggataaaggcgttactcttgcattaactttttattaactttatttttagggttaatttttgtttacttattaatatttttatgattttttctttgtggttgactgagggacgtgctagtcttttttattgtggttatagagtgagatagtactttcaacagagagtaaatcagtgattaactaaaataagagccttcattacccatgcatgaatctctgacaattgcattacttcaagcgcgagaaaccgcgatgggtttttttcgcccaatccttaaacgtcataatttgactgaacagcagtggcgtattatccgtgtactgtctgataatcggtcgattgatttttatgatttatcctgccagacctgtattcttcgtccaagtctgaccgggatattgactcgcatggaacgtgatggcttgatctttcgtcttaaaccgatgaatgaccagcgcaaactttatgtttctttgacgcaggatggtcagaaactttatgaaaaggcgaaagagcaggtggaacagggatatcaggcgattgaaaaagccttttcgccggagaagatggttcagctttcagtattgttggaggaattaattgctgttggtaagaactcactgataaatacaggaaaggatattaaataaatagcatttttattgaaaacgatggtaatgaataatcgtgaaattgctgagcagaatcagcaattatcgattttggttattgaataattagcgttaatatttcctgtgggtagataataaattgcccacgaaatagtgtacctgccggataatgaggggtgagtgtttcccgcagcgctaatgttatttcattattttccagggatagggcaataatttcagccgcttcaaagccaaagaaccgttttacttgtggatagagtgctttatacaaactctcttttacagaaaaggcaagggtaaatgcttgttcaagtggtaaatggcaatgtttcagaagttgaatttccttgtcattcacaatcatttttgtgatttcatctatattttgacgatcgacgatagcttctatatcaacaccaattaatcggttatgagtttgcggtgcagccagcacaattgcacaatgagatgaatgagaaacagaaccacaaatattctgcggccagattggcgcgcgatcatgaccagagatcaaattaaatgctggttgtcctaattgtgctaaaagttgtctggcacaataacgtgctgccagatattcagcccgccgtttcttgacggctttagttaaggtagcagggaaggggagatttaactgttcgaagagttcatcgtgataataagaaagatcaaagcgggcatgccagaaatgtacttgagggtgtttaacaaccgttccatactcgatttgagtgataaatccgttgtcatattctggcagtgatgcttgattggtgtgtataactgtctgttccatgttaattatccagataaggaaatgctgcccagtttatactgaatatcactcatattgaacggtaaaatgtgctattgcgttagcttttccacctgttattctatcatcggtttgataataacgggcggtgaaaggtaaattataacgagaattcctgtcagaatagcctacagcaaatggtttcccaataggaacgggcgttcccatatataaaatttgcacaccaacccctttggctgtatttgttgcattagttctgtttaattgaataatactctctggggcatcactgattgttcttgcggaaaatgtaattgtaggtttgattctttctgtacattcaatgttgatattaaaatcagcatggccggcagttgttccttttcctttaaacgaagagctgtaaacatcatgaaatctaacggtttgatcgccagatagcgccatgcaaccttgagcagtaacatgatatcttgttttgtttcttattgttattagacggatgccgttcgatgtttgtaatagggaaattattccagcgtgtaatgattttcctgatttaatttcaccctctttatagagataaacatcaatatcaccgatatctttccaggtaatttttttcttttctggcgggtaatagatataacttctaccatcaattgtgggatatttcatattatttagatttccagtagcagcaacaaaatataaatagaggttatctatacctgttgttaactttcctgtcccatgctccgtgttaccggccatgctgggataaacactttcaccaaaaaccaaatatccgttgtcatcacatgaaaaaataggatcatttatattgagccccatgctgctagctaattgttcagcactgaatctgacaacatgaatacttttagtatttgatgtgtttaagtttaatttaagtgaatttaaatcaaaatatacagtgccgttacccgttgtggattctgaaatacaagcagcatgtattttattgatattgaaaagtaaaacagcagaaattaataaccgtaaataatatttcatatctatgcctattgagatttattcttaattgctgacaacatgaattattaataacatcacttattaataacactatttatacccgtcatctttcaagttgcttctttgttggctgcactcactcaccccggtcacatagttatctatgctcccggggattcgctcccttgccgccgcgatgcatcttgaaatccatagggtatattaataaagtaatgaagtgagagtggcgcggcaccactatcttttcggtataagttatcagtggaattaatatggcagatctatttatcgtctaagtcaggttttaattctgctgtattattaacaccactgaggaaaatttctcttttttctcatgttatcgtgatgttagtaatttaagtcaaattggatggtttgtaaagctatttgtatttaattgtaaattgcactaatgcattagcggttccacctgttatggtatcatcagtttgatagtaatgagcgaaaaggggaatagaataaaccccgatcctaccggaaggcgtgactgtaatcggtttttgcatagcaacaggtattcctttatggatcatttgaacaccaacgcctttagcttcttttcctgaaccgtatttgtttaatctaataacactatccttatctttgtcaggtacttctgcaatggtttctcctgaaaaaactatggtaggaagaatattacctttgcattcaatcgatatattaaagggagacgatttacgtgctgcttgccatttcccattaaaatcagaaattttatggctgcctaaaaccagtttccggtatggtgttgatgtcatacaaccggtatttttaatgacattttcttttttatatttgattcttattaactctttatcatcatatgtagataaagatgaaattaatcctttttttaatttatcttttggtgttaaatctccatgttggtaaaggtacacctgtacttcacctatatcttttaaacttaatttcttatttttaggattactttttccacttccaaggtattttacgtaaaaagatatattattcgcacttgtttttatcaagccgctattgttaggattattagcaggtgctattttatttggtgctgttttaaagagaactgttgcattactatcgcaattagcaatagctgcatcggctttaatacctattttgctagctagttccattggtccatattgcgcgataagaatatgtgctttatggttattaggtgaattgataatttcatttatctcaacatttaaatcaattgatttaaaattcttgcttaatttacatgtggcaattgattttgtaatattgagtaatgttagtaataacgttgctaaaataattaatttatttctcatgcttttcctaggtaaatattaatttaattactgacagcgtaatgaagtcagaataataccattaattttttgatataatttactatcgaatttaatatgacaactttgtttctcgcctaaatcagcggttaattttgctgtgtcgctcacaccactgaggaaaacttcgcctttttcattcaccatgccattgacattatctgggcctgtaattatcgtgccgaatgggagtttcttaccgtgatgttgtaaagttaaaaatactcgatgaccaacacgaatagaataatccgctaagaccaaagctcctttggttggaatgaccttagtggttgggttatcaatatctacgtcatcaccgaatgtattggtatcaagggataacatattttcccgatattgcgatatataaggcacaatggtatatccccgccaatctgtactgatagaggtattattcagtaccttggcattggttgccccgggggcacgaattaaggcgctggcaccgctttcgctaatattttgtgccagagtaacgccatagggatgggcaataatagctccctctaatccataattaactcgctgattttttctatgatcggtggtataacctacattaattgaaccatatgagcctcggtaatatagactggcggcattacctgattgtttttctttctctgatttttcgtagctgtaatcctgagaaatcatatagttcagattttgttgttccagtaacgagccggataatgtcattgaatgctggctgctaccgttggtgttataagcggtatcataatctaccgatgcgctgtgattatctgatggcagccatttatccagaggaatactgatattgaatgaaaaaacttgatcattattaatacttgagcgattacgatgataattgtagcttaatgataaagagatatcatgaatattagtgttataggacatagaatatgactgattcttacgggttttatcttgccaataatcttgctgccaggccgataatgaaagattaccatattgtcctaaattttggcccatcgttatttgcatccggtttttaggcgcactatttctgctatgatcagcaaatgggtcgttattattggaatagttattattggcatcgctaaagctgtaataaccattggtattgtagcgataaccggctaatgtcaccgttgtattagtttcagtaaaacctttactgtagcgtatctgataagattgcccgcttttcttttctccgtttgggaaatgggttgctgcattggtgacatcgattgataccgcaccaatttttcccagattatgccctaaacctaatgcatggctttgatagtcagaggaaataatcactccaccataaatggtggtgctatcccataacccataaatagcttctgtttgaataaatctttttttactggcctgtttaccaccgctgaatttaccgatattagcaaaatatttcatttggccggcacggatcattaatggtgaggcagcaaagggctgagtaaattttctgatattgccattttcttcataaatagatatttccagatcaccattcaggttactggggtaaatatcagtaatttcaaacgcgcctggtggaacaaaagtctgataaataatattatctttttggtgcacttctactcttgcgtgagtcatagcaataccgcggacaacaggcgcaaacccttgctggctatctggcaacatttggctatccgacatcaatttaatgccattaaaagtgaaactatcgaataccatgctatcggtggatgtttcacccaataccagacgagatcttaatgggcgaatatcccgttcagcataggctttaagcgattgccattcagatgttgtacccgtatggttgtagtaactattatgacgaattcgccacggacctaaattaaagccactacgtaaattcagatattgattctgttcactttgatttttattccaagattgcattcctgttaaatgataattggtgaaaaacatcggcaaaccatcatcccactgctcaggagagatatcgcccctgatttgcgattgcatggcagcttgcggaaaatttagcatcagcgtcagagcacttagatccagctctgctgacgcttgtttaatatatttctcaggttgagaaatgatctcttgttcagcaagggatgctaattctgggaagcttgctatttttaccccgatttctttcagtaaacggatagataattcaggacaaagtttctcaccacagtcaataaaggacaggcttttaatgccaatatcccttttattgacgataacgttaactttatagatacctggaatatgggcgtccgtttttgccagactctccagattaatattttctctgtcttcgtctgataattgtaatgcattgatatcgaaatacagctctgcatatgctggcaacgataaacaacaaatcattaaagcaaagctaattatttttttcacaatacactcatcagacaatattatcagaaattaaactggcgctcttctgttgtgccaccgtaatcgttgatagcagtcagagttacgctttttatgtcatttttggttgaaaataccttatgactaaaagggggaataaatccgggtttaggtattaatgttccgttaattttcatctcattaagattaacgtaataagctgtggggttagttaattgaacaccatgggcattacgtgatgctgccaaacgattaatggcatcattagcctcgttatcagataacccggatggacgataaatcaatttgataatattttttatcgtgatgatcatcttgctattgtcatttttttcaacggccgggatcgcattgacattaagtaaaaatatcgattcccgatccacaggcagatgattgccgatatatgaagcacggatctggtgttcgctctctttcgacatcttaaacaatggtggagtaataacgaacggtactttattttgattgttatcgatattatctacccacgactgtacaagataaggtctttctgtatccgagttggtaatagaaatcgtggcttctttttgtgagccattatagatcaggcgagttccgcctaaagtaatccctgcttgtacttgtcccataaaaaagacaagcaaaaagggagtaataaagcgaagcatttttactcctttggttataaaaatgtttaattatattaaagatgtttattcgatgattatggatatatgattgtgaaattgaaagttttatctatagagccaatcgaaacattattttttgttgaaattagtcctgctctgaaattcatagtggcggtgttacttgcaattgttgcaatcccagggacatttgttcctggtgctatgttgtttccatcacttcctttgagtatttgaatacctacgccggcaagtcctgaactgtaaacatttttattatcagcgtcaggtccgccgtcaaatgagatacctagagctcctgtcacatcacaggatgttaaggagatagaaaaatctttacttataccaactatatttgcctttcctccaaatgcgttttttgacaacttaccgaagtctactgcaacatctttggtagttatcgtacacccttcattaataatcgtacctcggaatttaattgttccatcataagataacgcactgaaactactgaaaactgctaataccgtcactaaagaagccaaaataaaattctttttcatttaaaaataccttaccttaataaatatgttttttagtcttgtctatacaataaagatatatatctgaccattaggatagtttaatggttgataatatcattgaagtcatttttatcatggtatatacccgtcatctttcaagctgcctctttgttggctgcactcactcaccccggtcacatcgttatctatgctcccggggattcgttcccttgccgtcgcgatgcaacttgaaatccatagggtatagaatgcaatcgcatatttaaccatttttttcatatatctttagtttatcctaatttagtcattgtttctcaccatgttatagtctgtgtatttatattcatattgttgataataaatttctgatattgatttttgatatagaaaagaatggttttttctctgagatatcatctattattgtaagcttattcgtgttgttaataatgattcttatttctatttaaatgcttgtaatgctatagcatgataagtaccatattgatagcaaaattcttgtaaagtactgctaataacagtgaaaaactcttataggtaaagtgtatatcacatatggataaacttatcttcactatttttattgaaatggagattcaataacgatattaacaatagtaatctatagctactcaacacactagtatcttactcaaagaaagtgaatattctgattgggcaaatcgtaatatataatgccatcgtattaacgatattaatacgatcgggtaaattgccatcttaaccgcgattaagataacgaaaatttcttcttatttttcttcggattttaagttgaattccaattcagagtttcgtttttgctttagttttattctcactcgacggaaaatagtattaactaaaatatgatctttttcaacaacttcaacaaaaaaattgtattttttttacaattaataaaaatttctttttatttcattgtgttataagattaaattaatcgattgattgagttaattcaatcaagaaataataatgatgtgtatttaatgtcttatttttcatcattatataaattagacaaattgattcatttttgtcttattattaattcggatattctgttgctatcgatgtgtctgtatatttcatcatcaaaattattaatcacagttttagtcagagaagaaattaatcgggctggaacaactgtgttaacagatgtcaacccctgttatctgatgtggacatttagtgtgctaatatcgaaatagtagtaagtcacgtaatgaaaaattaagtcatggaaggtattgaggttaataaggctaattttccagatacctgagttgtagtgatgggacataaaggtgttctatcaggtagaggtaacacaattctgttttggttatattgctgacaatggacatattttttgttagcttctttcagcggcaatgttgttatttcaacagatattattttttcactacacgatgattatcctaattgctgaaatatcatcaggggcctgtttgttatccataggaaatgatgatagcgattacataacgccatttcccacagtcaaatctggtggagtatgggggaagtatttacgctgttttcctccgagtagctattttgctttgccttatttgctgaaaagcaaaggatgtattgtcaataatgcgcctgtgtcgggactaggcgctgattgggaaggcctacactattccccagtcatatagttatctatgctcccggggattctctcccttgccgtcgcgatccatcttgaaatccattggatataaatattcattaaatttcaaaaataaattaatgaaattattttatttttttattaatttataaaataaattacgtaaactataattcaaagttaatagtaagaaacataaaaaatagtggtgaaaatagtattgtgaaaaacaagtgattaattttcatttgatgacaaatgtgactagtgtcaaaaaaataaatattttttaccataaaatggttaacaattaaaatttatttaactactcttaatttgggcgttaaaaatataaaaaactgttattgcaaggtgggggaattatcacctaacttatagtaaagtataattataattaagcagtgtagatataatgatcatttatttttttgaaatgacattttattctgagctatttttaaactaagttttttataaaaatgtgaacctaatttttggataataaacaagcattcatgctctcgccttgacaattatcgagaatgaaaaatgaaaaaactatctaaagtcacattagtaaaacgagatcatattccatcgattcgcactattgaagtgaatggtgtggaacattggttaggacacgtaaaagatttcatgaaaaacaaccaattgagcgattttttaccagatgataaccgtatatccatggcatgggttcgtcttgaagctggtgaagaattagtaccacatattcatccagtagaatcaatgattttgctctgtgaaggttctgctgaatcaacaggggatatacaaacagctatggaagcaggtgatgcgcttttagttccacctggtcatctccacggtttcaaaggtggttatcccgatggtttctggggattatccattcaattcgattctcgtggcctttacgaggattttactgacccttgggcaactttccttcctgagcaagttaataaaaatttagctactacaattgcggaacaattattttctcgtaatgagatttatatggaacgtttcgataaacataaactttttgccttagtaaatcgtggactattaaaaaaaacacaagcaaagaaaagatttctcgattgtttccaagtttggtctgaccattttcagaaaatggtgttaactcgtgctgcaacattacacaacgctgtttttgaagagattacaatgtcccatctagaagaagaactcggacataatcgtgctctcaaaaataaccgtgtagattttgaacctgtatttgatccagttcttgaagccgcaagttcatggtttgcttataaaatgacaacagcaactgaattagaaaaagttgttttagtccatttagtagttgaagcctcagctattttcttctacaaacatattaaacctgtaatggatgatacgactcctaaagctcactttgacgttcatagtattctagatgatgaacatgtacgtatgggctatgaatttatatctaactacaatattgcagatggaaaacctttatttgagatccaaaataaaggctgggctatgttaatgactgtaatgtcacgtatcgctgatttaacagtatacgaaagtagtgcaataggaaatgaatcctaggagttggttaatgaaccttcaatgggctaaagaaggcacccgaagggtgccctccaaaatttatatctgtaaccagatatatgaacaagaaattaaaaatatttttctgggaaacacatggaattatgttgggctttcttcagaagttgaaaattttggtgactatatacaaacatttgtgggaaatattcctgtcattttaatccgtgatagaaaaggaatattgcgcgtatttgtaaaccgttgtccccatagaggagcaaagatctgccataaccctcagggtaatactaagttacttgtatgtccttatcatgagtgggcatttagtttagagggtaacttagctgggatgccttttagaaaagggattaatggaaaaggtggaatgtctgaattttttcatcctgaagaacatggtttgcaagctcttaatgtgactgagagacatggtgttgtatttgcgagtttttcatatgatattgaaccatttgaaacatatttagaccctgtcatgctttcatactttgatcgtgtttgtgatggtaggaaactaaaagttattgggaaaatgcagcatagagttaattgtaattggaaacttcaaattgaaaatgtaaaagatccatttcatgcagcacttctgcattcattttttaaaaacttcggtatttggcgttcagatcaaaaaactagtgtaaaagtttgttcttctggcaaaagcagtgtattagtgtcaacagcatctttcaccaaagctgaaattaaaaaaaatgcagagacaaaaacagagttatcacttttagatccgagaattatcgaccatcagcgtgaatatgaccatggtacaggcgcaattatgactgtttttccaaatcttatcctgctgcaacaactcaattgcttagctatgcgtcatgttattcctgatggtacagatagttgtattaaaatttggactttttttggctatgaaaatgaatctgaggcgttgacgaaacggagattatttcaagcaaacctactcggtccttcaggattggttaccatagatgataatgagattttggctgtaacccaagaaggggctaaaagcatgccagactccgaaatcattttagaagctagtgttggtgagtcgagtgaagaccacatgatgacagaagcggctatccgtggattttataaatattaccgaggagttatgaatcttggatgattataaaatttggtttactatcaataggttgtatagcttatacaacaaaaatttagactcaaaaatattagataattgggcatcatattttacagatgattgtatataccgaattacttcaaaacagaatatagataatggatgggatctatgctttgttttttgtgaaggaaagaaaatgctcatagaccgtgcatccgcgttatctgggtcaatttactttagagacagagtacaacaaaggataacatctaatatattattgacaaaactcgaacactgtggagagaaaatattagccaatacagaaacaatatttacaattcatgaaagcatatgtggtcaagaaaataagttgctaataagtggtataactaaggatattatcgaatacaaaagtggtactgctttatttaaagagcgtctctgtatttgcacagcagatattattacagattcaattgtgtatccgatctaagttgcattctatataattaaatgagaatgaattttttatcctacattttgcatcaattttgggaattctttctccgaaagatgtagacatgagcaagaccatttttggtttttgggtttctttgagaagtgaggttttttttgataaaaaatattcacaccatcaaagaaataggtattatttctatagtgaaaatttgttgtgatcctggaaagggaaatatcagattaacagttggtattgactataaagcacattgaaattactaaatttaattacattgattgtgatttaaatcacaataatgaggtgcgaaatgacggccttaccattatcaggaattgttgttgttgatttaacgcggcatagggcgggcccagtcacatcacgactactgggtgactggggagccgaaattatcaagattgaggaacctaccgataaaggtgacagtatggggggcgctcgtgaaagttttgattaccaaaaccttcatagaaataaaaaaagcttatcagttaatttgaaaacaaagcaaggacaggagattctccagcgtttggtttgtaaggctgatatcgtgcttgaaaattttaggcccgaagttaagtttcgtttaggtgtcgattatgaatctttgaaaaaaattaatcctcgtattatatgtggcagcattagtggctttgggcaaaatggcccttatagttctcgaccagctgttgatcaaatagtacaaggcatgtcaggacttatgtctgtgacaggtactcaagaaagcggtgcactcaggactggtgttgctatcgctgatattagctcaggcatgaatctagctcaggcagttttactggcactatatcatcgagaaaaaacaggtgaagggcagtgggtatatacttcacttcttgaatcaactttagctatcatggatttccaagtcgctcgatggcttgcagatggcaaaacacctgagcttatgggaaatgaccacccgacattaatgcctactggtgtcgtaagaactaaggatggtgaaataaatattgcggcagcagaagatgaaaaattccgaaagttatgtcatctacttgatatagaggaagtttatttgaatcctcaatattcagatatttataatcgttcaaaaaacagaaagcagcttatggatgaaattcaagctgtaacacggaaattcgagagtaaacagctaatacaaattctaaacgagaatgggataccaagtggttacatctatgatatagcacaagctatgtccgatccgcaaattcagtatttgaagatgaaatgttctattaagcacccattattaggcgatttgactctggtaggtcaacccatgcatctaagcgctttctctgactttgatacagtacgtaatcctgctccagagcatgggcaacacacagaaaatttattaaaaaatttccttggttttgatagtgatgaaattgcattgtttcgcaaaatagaagttatttagaagcaataagataatatacccaatggatttcaagatggatcacggcggcaagggagcgcagccaacaaagaagcaacttgaaagatgacgggtataaatatatttaattaatagggataagacaatgaatgcaccgtacactgaaatatataatttttggtcaataaaatcttttataaggctatttttattatggctagctggtgcaggaacgcgtttgacaatattggctaccccacccatcatttctgacattcatcatgatctaaatttaactgaaactcaagttgggattatttctggcttgccagcagtattatttgcaggtaccgcaattctaggctctctattaattgcaagaacgagcgcaataaagactcttatccttggtttgctgattaccagtttaggttctgcattccgtggagccgccgatgatataattatcatgtatatggcgacaatgataacagggttgggagttgcttttatgcaacctgcattaccttctattgtgaaggattggtttccaaaacatattgtgattgcgacggctatttatgttaatggccttcttcttggaggagaagttattcctgttgcagtgacaaaatctattttattacctatgttgggatcttggcgacttacatatgttttttgggctgcgataacattaataattgcagtttttatatacaaattagcacctaaaaataaacatgaaataatatcgataaataaaaatataaagtgggtgccagaatggaataacattatattatggaagttaggattaatgatgggatgtgtaaatgcaacatattttgcaaccaatttttttattccacgttacttacatgaaactaattttgaggatttaacatctatttctttggttgctttaaatttaggacaaatccctgcttctattattcttatgatgacaagcgccactgtagcaaaactacgatatccatatttgatatcaggaataggattaattgcatcttttagcagcattatgtactttggtactgaatatatagttattagttcagcattcatcggttttttttctgctattgttttaatactaatgttaggactacctagtatgattagcgagccacacgaggtacatagatctacttcactaatgttgacagttggttatacttgtgcagttataacaccagtaattagtggtttatcatgggatatttcaggaaatccaagttatgtatttcttcctatgatgatatgttcagtcatcctgcttatttcagcaataaaaaaaccaatagtaaacaaagtcataaaaaataaaatttaaaatctgtcggtgataattttggagagaaaacaaaatgagtgataaaattgaatataccatacgtaaactaactccatacttttgtgcagaaatacgtgatatcaaactaaatcagccattaaataaagatataataaaaaccattgaatcagatcttgaagagcatgaagtattggtatttccagatcaagatatcacatcagaagatttaatgcgtatagggagatattttggccagttaactgtacatccttttgcagagaacagtgaaaaaaatccagagttaatagtatttgattataagagtggtaatccacctgtattaaccgatcgctggcattcggatgaaacatataaactttgcccccctatggctacaatgctctattcaagaattgttcctgaaataggtggtgatacttgttttagcagtatgacaactgcttatgattttctttcaataaaaactcaagatttcattcgaggattggaagctatacatgacttttcatcgtataaatatctttttccagacacagaagaaggtaaaaaattattgcaaaagaaagagttggaatatcctccaatcgcccatccagttgttcgaattcatccaaaaacgagaaagaaaaccctatttgttaacccaaattacactcgttatataaaaaatatggatcaacgagatagtgatgcactactggcacaattatttaatacaacatcagtacttgaatatcaatataggcaccattggaaaccaaacatgttagtaatgtgggataatcgctctgtacagcatgctgctgttcatgattactatccaaatcgccgatatatggagcgggtgactattggaggtgatcaaccaattagtgagtcggaacctgcaagccctgaacaattgcgtaaatttaaagtaccagcatataaccatgacgattcacgccgtgctaaacgtcaattcgagattgaaagttagtgctaacttaacaaagggacgcttaaagtccctttttgcttttcacctgatgcattggttaataaaatgaattctacaataaagttgagtgtccaagacacaattagatttgcaaagatatcatctttgcatatcaaaatattatttttatgtttgagcattcttattttagatggtttcgatactgctctgatcggctatattgctcctgctattgttgatagttgggggatttcaaaaacagaccttggaattgctatgagttcagcattggttggtttatctgtgggagctgtaacatcaggtcctatatcagacaaactaggacgtaaacctgttattgtaatttctgttttcatgtttggaatttgtagtattgcaacgatattttctacaactgtttaccaattatcattctggcgtttattaaccggaataggtattggagctgctatgtctaatgccttgacattgatttctgaatatgcaccagaaaatagaaagtcacttatggtgaactctgtattttgtggatttcccttcggagcagctatgggcggtattcttggctccttcatgattcccaagtttggttgggagagtatgctagttattggcggaattatccctatacttttagttgtcccacttattttcattcttccagaatcagttttattcttgattaataaaaacaaatcagaagataaaataaagagaatttgcaagaaaatagttggtgaaaattataataaaatagatttttcaagattaaaatttatcgaaaagcaaaaaattaaacctattaatgaaattttatcccatggacacttatcatcaactttgcttctttggaacgcatattttatgggattattaatattctatgttgtcacaaattggatgcctatacttatcaaagactctggttttgaattaagttatgcaactattttaactgctttatttcctttaggtggtggaattgggacgataatatcaggaattatcatggataagctatctcctcataagatagtatcatttaactatctcataacgggtattttgctcttctctatagggtatgttgataatataatcagtttaggaatattaattctcttagccggaacgacaatgaacagtgcacaagcatctatgggaacaatagctacacttcattaccctacaacctccagagctacaggtgtatcgtggatgcttggtattggtcgtgcaggagggatattaggtgcgatgtttggagcatggctagtgcaattaggattaggctatcgaggggtacttatgactttattcattccatcggctattgcatctatttcattacttagtttactcatggtattaaataataaaaaaattaaaacattttcatcataaattatatttcatttatatagattaaacttgatgaaatatggtgttttaaaaaagtctaacttgataatatcatgttatattatcaattttattattttactcgattgaggaggttttctataaatcaacatattatccactataccctaaagatttcaatactggcattggtatatcacttctcctgttcccgagttcctgaaatatcatcgtggacgttgtttgatgacaggcggattattttgggaaaattctaagctagtgaccaatttttattgactacaacactttgccaactagggggaatttactactggtgattatgaggaaattatgaataaggctagcgctttcagcctagtgtctaacgtcatacggtactggaatacctataaaatcagcaatattgtggatgagttgagaaaatagggagagagcgtgatcgacgataccttggtgcatatctctgctgccttacaaacacgtactgctaaacgggacctattttgttgagggggagtgctggaaagaattaatttacggttcaggttgtttctatcagtgcgaaaccgtcaaatgccccgctgatccaagttgattgtgccgccagctttccacagtacgatcccgcgccatcagtgcccataacccatcacgaatcacctcgctttcgttcgcgtattcactagtgcgtactttagacttgaccacgtccgccatgttgttggggagggtaatactcatttgctgagtagttctcacgattggttcctcttataccaataggattcaatcctactcctctaatttttaatgagccgcattgattgtgttgcatttgcaagtgatgttttaatgtccgtaactattttttcgatataaattaggagaatatgaatgagtaagctgattcttccctctgatatgttgttgaaagagggacaaactgtttcgttgacccaggtagatctaactaaagaagattcatctctgctggagttactacaacagcaaattgaagccgaggacagtctcgcgcaactagccggaccacgttggtatcgctctggtttaggtcctaaaccaactcaaggcggggtgtatgtttctggtacaaccctggctcccggacagacgcctccagtaggaattgtgagcaccattctgtgtaactatgaccgactcaattgggctggctggcaaaatcaaatcacgttgcgtcttctcatcaccaccccgaataattctgctgcatgggaagcatttctggatgtagccagcgactcggccactgtcaatgcggctggatcgaatgttccagcagattgcaggattaccttgcaaatgaaagtcggaaatatcacgggcgggttgtatcagccgccgtacatttcgtcctatgactgctgggtaaactacaactaatacgaactgttaaggacacgcctttggttatgtgccaaaggcgcgtttctaaaaatcaggtcgcttcagagaacggaatttaaagcactataagggcttcccatagtcagcaccggtttgttttttcatcattgaagtcaagggataagaccgcggtactataaacggttatgatgaatctgtttttgctgtgtacatcctgactgagtattaccacgatggagatgtgaatgggtggaacgcggtttattacctgaaaacgaaaaggttttctctgttgatagtgatgaatggacgcctgaacgacgattttgttttaacctgtttttaaaggtttcttttccttcttcaaggaaagaatcctcgtgagtcttattgtttatatcttcctttttacgaaatcttctatttaaagatcataaatatctacagcagtgaatgatccttgaaggattatctgcactgacatctttttagggtaattgaaatatagattgaagtgaaacataccattagcagagcttcaagcagcgaagttacttgctgttttacaacgttattaaatagttatacctgattggagaattattgtggagaaaaaagattggcattcggcagatattatcgctgcgttaaaaaagaaaggaatgtcattggcggctgtttctagagaagcagggctggcatcgtcaacgttatctaatgccttgcaaagaccctggtgtaaaggtgaaacaattattgcaaacacactgggacagaagcctgatgaaatctggccttcccgttaccagaaaaggaggaagagatattgatctccaggcgaaagaatatggtgacagttataggaaccataaaagcaacgctctgaaagtgctgcaacacaatcagagcgtctaaccacaacattacaggaactaatgtatggctaatgtgaatagtaacatatcctcatactcaaagcgttatacatttgcgcaatctaatgtagaaaccgaagcacataccgtgcttacaggcttttctttggttttaattttttgtaaaccaattgggaagcaatatgatgtgaatatcctatggtctggcatgtcggatgcgattgcatcactggatctctcatgtgttagtgatactgtactgtgtcagctaattgaatcatccaaagaaaatactatgggcatttgtcatggaataacttttcttggtgactcaatgttgtcgtttgccagtaataatatccatgaatttactccagagagtttgtgtcggctcgggcatagcctatcagcgctgagttctctattaccgatgctgtttaccatgcatgaaaaagcgagtggtgaatatcgtcgtagaacttcgaaaaacgagataaaatagctttgtcaaatgaaaccggaaaatttttggatggttttccggtttaaaggcataaactatcgccgacagggtgttcgatactcatcagagctgatttttccctttcccgaggtctgaactggcaccgagatgtcgtcaccgtgcactttgcccggcatcagcacgcactagacgtagaatattgagggctgtttttgcctcgatcagcacgttcaaaaaagtattgaatgccatctggtgtaggggcttctgtccagccagttgcccgccattttttcattaacatcgctgagtaagcccccggagacaagcgagactgagttgttgcggaccggtaggatgacatattgggcatcttcccgtatttttgaggaaaagaaaacaatgcgtcgtcataccgtaacagatattacggttgcagtactaagtttccacatagcttaagtataattctcattaactccgattaatttctttaaatttctggatagtgtgtttgatggcttgttctgttggcaaacgctccattgaactcgctccatagaacccatgacaattgggacaatgagccaaaatataagcgacatcttccggttccgaaattgggccaccgtgacacaaagtaataatgtcatttcggatagttttagctgccgaagcacaagcgttaatgattggtatacaagatttcagatcatatgatgtattagcactaatatcaccgccagtggttagcccaagatgtacgacgatgatatcagcacctgcttgtgccatagcctcagcctctttttcattgaaaacataaggcgtggtcatcattcctttttcatgcgccaggcggattagcttcacctccagtgcatagcccatgcctgtttcttccaggttttttctgaactttccatcaataagtcctaccgttgggaagttctgaataccagcaaaaccttgtgccttcagttcatccaggaaaagagataaattacagaatggatcagtaccacagacacccgccaatacaggtgtttccttaactatcggtaatatttcattacccatttctctgacaatttcatttgcattaccgtatggcattaatccggccaatgatcctctgccagccattctgaagcgtccagaattatatacgataatgaggtctgcccctccggcttcctcgcaacgcgccgaaagaccactacctgcactcgccccaataatagtttcgttacgttcgactttttgttttagagtttcaataatctgattatattttttcttcatgaggaattccctggagtcctataatttccttgaattgttgtattacaagagcacaaaattgtggtgaattgatgtgaaaaggtgtttttataacttttcgcaattctgtttgttttattgttttttttaatccatgacagaaagcctgtgttgatgcaggtaaataaaaaggttgttcagggcaatctagcgcagagaatccgccttccggaataatgaatcgaataggtccatcacacttattaagtttattccctatccagataccaagctgatagttttcttcaggtgtggttcgcatcaatgtcacctgagaattatgctcaataaacagcctgttgctgtagcgttctggaactgtgtcctttgcaccaaagttaaccatgtccaaagcaccagcactgccgatccacggaatatttttttttgcaatgacgtctaaccgtgtgtcaggacaacccaaaacacccccaaataacagatcggcaatttctgttaatgtaatatctaaaacacaaaccaattcgccgtccttagctaatttctccatgcttgttccaccattgccggtagcatgaaaagcgaggcaatcgtattgagtatttaactcagtagtgagttgattaatgcacggcgtcgtcataccaaacatcgttaaccctaaagcgggtttatgaatatcagccaatggcgtaaaataattgacagagcccgccatcatatttgcagcattagacaagactgaacgggaaatacggttgagtccgttgagatcggttaccgtataaagcatggcaatatcgctgtccctgacgtaggctgagacattccccgatgccatcgttgataccatgattttaggcaacccgatcggcaggctttgcatagccggagtaatcagtgctgttccgcctgagcctccgataccaatcactcccgcgatatcgtcgattgaactgttcaggaaattcgtgagggcgacagacattgctgttatcgccttattccgtacgccacaaaaaacgggatcagcaccagcgggatgatactcagccacctgaagtgaatgaatatctatctttttattctgatgatttttctcaggaattgatgtagacacatcaatgataattgaattaactcctgcgaggtgtaaacaacatttcaaccagaccagctcgtccagttttgtgtctgctgtgccaacgacaactacaaatcgcgtcatagtgttcaccccatgtggcatacttagttcaaaggctaatgtaaacctattgtaatattttacaacatgcaagttattttttatcattagtgatatttattactgttaatgctatacggttaaaattttaaggggattaaatgattctgtttgatgaagaaaatctgtcgccagtccggcgtcgtaccctggaacgtatcactcattcagctctgaagttatatcgtgaaaaaaaatttccgtctcctgaagagattgctaatgaagctgaatatgcgaaggccacgttgcgcagctacttttcaacccacagtgattttgtcgaatatgttgtaaaacaagtcattggatcattcgttatcccccctatgggcgatgatgcagaggaaaatatcgagaaattattaagatggggttatgaagaaatagaagccaatgaggcactgatgagggatgctttacgcatttctcagttacgctggcaggaatctttatccggtgaagataaccacaaacgacctgttttgaagaaaaaaagtaaccgcaaagagacactttctacggcgttagcgccgctaaaaggtcagctcaaagatgacacaatacataagattattatgttgatttcagttttatatggtacagaggctatgactattctgaaagacacttttggtttagaaaatgatgacatcatcaacttaacgagttgggccgcaaagttgattatccggcaggccattaatgaggaactaaaataatcagaagaccatttttaacacaaaaagagtaaagaaaccgggcatgaggcccggtaaaagtttcttttggtgccgataatttctgttaccaatcctctgattagatataatctgagttctggataaaaaaattgaactcaatgcctgttcgaaaaacagagttttcgaccaagaaaattaaagtgatgatataaaggtcataccatctggctcttcgccggcgctgacaaagatggagaacgagcggcccttctgtacatcttatcggtacctgtcggctaaagaaagtggatcccgaggtctggttacgccatgtcattagtcatattgcggactggcctgcaaaccggatgcatgaacgggtcgatctcacttcttagccaccgtcaatatggtttgaatgtgctgcttacataggggagcgggagtatttgaatattcatcactatcaataaatcagagttattaccaaagaaagcgctaccgaccttgattaagagatataaataaaggttcaaaggtagcgcttaaattatatttacaactttctcatgtaaatttttaaaagagttttaaccaaccctggattattaataacattagcatctctttcctcattatatgcgacaagagtacgataaacttcttgatttatatcacacgccagtgtaataagacccgataagggttatgaacattctttagttattttttcaaggatcacctcatataaagaagttgccagatctgatatatgcatagcttgatctaatgaaacctatttttttatagtaccccctctgaatacacaaaaatcatggtgaatttaaattagaattggatagcatatcgactattatcattagtgctgttattcaaataatttcgaaaatttaacttaatgggatccccattcttgttaaaatatcgactgggccaaatttctgaaggatgtactcctagtctgtccgcaataatcctctcccctttaggccaccggcgtattaatgcattagatagtgtcgatggactcagtcccgattcccttgataatgcggcaagtgtggtgccgcgtttacgcaatgcagcaataatatctgccggatgccagtcattttgagtcgttatcatctctgtttacttcccctaattgatttatggtggctattcaaataggatgcatgaatcagtgttcatttccggcgagtaaaaccaaaacctctcccaccagaaccgccatgaaaaggctaataacagacatatcggcaaaaaatttcttaccaatgtccatgaacacaggaccatgattcctagttatttatcaaattactattactaaaaaacgtccttgttcattcatgaccattactgttgcaagtaatgttttgcgttattaccctgccaaaataattttcattttgattccaaaaaatttttcactttattatgagataagctgggattattggtgaattttaaggacaagactaaagctgagcattcttgttcaaagtgaacaatgtctttatgccctggagtacatgaacatctgatcccaaagatatcagctaattccgatggtttcatcaatggctctagcctgagccgttttaaaatttctttctgattatctgacatattaaatcattaaaacccttattcttgaatggatatttttatttccattttaattaaaaaaaatcgtaaatttcattaaagggaattcatattaaaaagtgcgttcagcttgtttccacactttatttcttattaatttaggttcaacaatcaaacttaactcacaggcaataatccaaacaacagccaaataatctttaatgttaatctgattaatgcacggagtcgtcataccaaacatcgtcaaccctaaagcgggtttatgaatatcagccaatggcgtaaaataattgacagagcccgctatcatatttgcagcattagacaagactgaacgggaaatacggttgagtccgttgagatcggttaccgtataaagcatggcaatatcgctggccctgacgtaggccgagacattccctgacgccatcgttgataccatgattttaggcaacccgatcggcaggctttgcatagccggcataatcagcgctgttccgcctgaaccgccgataccaatcatccccgcgatatcgtcgattgaactgttcaggaaattcgtgagggcgacagacatcgcggttatcgctttattttgcacgccacaaaaaacggtgtcagcgccggcgggatgatactcagccacctgaagtgaatgaatatctatctttttattctgatgatttttcccaggaattgatgtagacacatcaatgatgattgaatcaactcctgcgaggtgtaaacaacatttcaaccagacccgctcgtccagttttgtgtctgctgtgccaacgacaaccacaaatcgcgtcatagtgttcaccctatgtggtatacctagttcaaagacgaatgtaaacctattgtaatattttacaacatgcaagttattttttatcattagtgatattttttattatgaatgctatacggttaaaactttaaggggattaaatgattctgtttgatgaagaaaatctgtcgccagtccggcgtcgtaccctggaacgtatcactcattcagctctgaagttatatcgtgaaaaaaaatttccgtctcctgaagagattgctaatgaagctgaatatgcgaaggtcacgttgcgcagctacttttcaacccacagtgattttgtcgaatatgttgtaaaacaagtcattggatcattcgttatcccccctatgggcgatgatgcagaggaaaatatcgagaaattattaagatggggttatgaagaaatagaagccaatgaggcactgatgagggatgctttacgtatttctcagttacgctggcaggaatctttatccggtgaagataaccacaaacgacctgttttgaagaaaaaaagtaaccgcaaagagacactttctacggcgttagcgccgctaaaaggtcagcttaaagatgacacaatacataagattattatgttgatttcagttttatatggtacagaggctatgactattctgaaagacacttttggtttagaaaacgacggaatcatcaacttaacgagttgggctgccaagttgattgttcggcaggccattaatgaggagttaagataatcagaagaccattttttaacataaagggtaaaccgggcatgaggcccggtaaaagtttcttttggtgtatgggcctgggtattttgtgagtggttatggtcgcggtaggaatagccgttaccggctacccccccgcacagatccggacgtgcgctactaacgcattcggctcctacctcgggtgtttggcgtaaaagcgctgcaaaggataaggatgcacagttcggggggacggtatccattttcacccgctgactgtaacgagcccacgtcattttgtgccgctggcttcgccgtctcagtgacttcagccacatcagcttcacttcttccacaaattgacacaatgctctactgttgaaggggacgccatagtaattgatgtgtccttctaccactcgtttcagccaccggcccgtttcttccgggcggtttgcagccgttgccgcagcccctgttttattcgcttcagttgtatttgacgccgttttcgttgggttttgcgcatcaccgcatccttgcccgtgtgtaatcgtcctatataatgcgtaaatcccagaaaatcgaacgtccccggcttgcccctctccggtcgctcctcatattgctttaacgcaaagcggccaaatcgtaccagccgggttttcgctgggtgtaccttcagcccaaactgcatcagacgtcgttgtagcagggattggcacgcccgagcatcctgatgtttctggaagcccaggactgcatcatcggcgtatcggatcatcaccacctctccttgcacccgctttcgccatgcgttgagccagagatcaaagctgtagtgcaaatagatattcgccagcagtggcgatatgacagcaccttgcggcgtgccgcaatgcgacttctgtcggtgaccgtgttcatcaactatccccaccgtaacccactgcctgattaatcgcaccatccgaccgtcccttatcctgtgctgaataaaccggatgagccagtcatgttccacggtatcgaagaaccgactgatgtccagatccagcacccaattgactttcctctccataacggccacattcagcgcgtccagagcatcgtgctgccctctgcccggtctgaacccatacgagaagccgagaaaatcggtctcgtagatttgatttaagaccgtgacagccgcctgctgcacgattttgtcctccagacacaggatactcaatggcctttctgtcccgtcttctttcaggatcatcacctgccttgccggctggggcctgtattgcccccgatgaagtctgccgtggagcgcatggaggttgttttgcagattttctgcctagttttcccatgtgataccctcgcagcccggggcagactgacgtttaagttgctgaaaactctgacataaaagttcttcactgatgtgatgaaaaaggtgagtaaactgttgtttcctatccctctttgctgcttttcgcacagccagcaggcgtaacgtcgtatttccccggctctgtgtccggatacgggcgcactgttggctgttccccttggtcgggagccttccctccatcaattccgccacattgttttctgttttgttcactgatttctccggtactatactcccgtccgacttcctgaactccctaaggcttctgctttgacacttagaccttatcgtcccaactgctcacgatgggaaaccgttcaggatctcccaggttccgcgcgacgaacttcctcacatgcacagggtctccgaccccgggaggtatggtcaggtttcgccaatacaacctgaccattgtgggtttctgcttaccttaactgcatcaccacctccgatttaccgatttcgtggctcaatacctggcctgtgagtgccttcgctaacacttcacgacaggagttacccacagtcgcgcatagctaaagggccaggtgagtggctagctcttacccggaagggactttcaccctctgttctatcgccagcttgcctggcgtactaaacgttcggttacctcaccttgttctccccctctggcccatgcacgctactgcttccttattttctatttggagactaacaccatgagccgtagccgatataccccggagcaaaaacagcaacatgtgacccaatggcgccacagtgacctgacccgaaaacagtattgcgaacagcatcagctgagtttttcctctttccgtgactggattgccgacaataacaaaatgcaccaacctctcagccagacactgcctgatgtggcacagtaattttggtcaccgtaataaaggtgatatttttacttcaacaatcaaacaggtgacatgatgaaaagaagttttagccctgaattcaaactggaatccgcccagttagtccttgatcaaaattacagtgttatggaagccgctaaagcgatgaatgtcagcaaatcagccttagggagctgggttcgtcagttgagacaggagcggcaaggtaaatcttctaaagccatgcccatcacgccggagcaaattgaaatacgtgagctgaaaaagaaactgcaacgtattgaaatggaaaatgaagtattaaaaaaagcttctgcactcttgatgtcggactacttgaacagttctcgttaattgagcaattcagagtgcattatccagtggctttcctttgccaactgttcggggtttatcgtagcagctatcaggcctggcaccatcgagtgaaaaagcccgatactgagcgcatcaggttaaaaagtttagtccgggaagcgtttaatgagggcaagggctcagctggcgcacgaacgattgccgccatggtgaccgccaaaggcataccattaggccgatggcgggcaggaaaattaatggctgaactggggctggtcagtcgtcagcagccaaaacaccgctattcacatcaggaacaagaacatcttgatattcctaacgatcttgaccgtcagttcacggtcaccgagcccaatcaagtttggtgtggtgatgtgacctatatctggacaggtaaatgttgggcctatctggccgtcgtgcttgacctgtttgctcgtaagcccattggttgggcgatgtctttctctgccgactctgagttgacaaagagagcgttggaaatggcgtttgaatcaaggaggaagccacaaggtgtcatgtttcaccgtgatcaaggtagccactatacccgcaaagcgttcagacggttattgtggcgttatggtatcaaacaaagcctgagccgccgaggtaattgctgggataatagcccaatggagcgctttttcaggagcttaaaaagtgaatgggttcctgaagaaggatattcagattttagaaaagcctttcgctcaatcacgaattatatacagggggaaccccgtcaatcacgagatttcccttatgtctttattacgtttttatatccggcatcaattcgcagagcgaatggggctggcgctggatgacgacgcgattttctatctgtttcatgagagccagggagattacgtcaatacccatataaagtttaccaaagagttacttttgcccatcatgactcatcttttggacagtttgtctgaggatccggcaaaccgggccagatgcagaaatagtgagcgtatcctgacgttatggatacggggaatggaggcgatatctcatgtttatcaggatccgatgctgatgccttatacccatccggaaagcagtggtcgtgtggatacccttatccggccggataccgccgtgttactgaatctgacggcagagcagtttttgcgtctgacggcgcaggacagcctgccggaagatgagcaaattgggctggaacagttcagcaaaacacaacaatactggacacgttttatggactatttggataagcagttgacagaaacgtgtcggtattgttttgaacgtttgggtcaatttcttcgttacttacaggttgaaccccgtttaatacggcgtttttccttcgctatcggttacatcgatgtcttaatggggccacaggatttgcacaatattgaggcagaggaatttgagtcagggtatctcgaagactatatcgatgcggtctccgatggattgatgacacccgtccagtttcgggttgatgtggtatacaaaaatgatcgtgtgatagcgagttttcgatcagatgtagacattgaagatgttaacaacccaacagtcagagattatcgggatgtggtggatgaggcaatcacctgggtagatgagcagtttgtgcggaaaacccaccgggagagcactattacccccatacgaaagttagcggcttgattgagagttaaccctgatttgcgggtaagtcggtggttgtttttttaccctgacgggcgttatttcccgtcaggggataacgcccgtttttattttcggagcgttaccgatgaaaaagattaagaccaaaacattcccaaaaactgtccgcaagaacaaagctgcccatcgtcacggcaggcgtttccggcctgatttgtaccgggtgatgacgggcaggattatcgcggcgtttggaaagagaaagcgctctgatgtgcaggccacaaaattgtggagaccggctgtccggttataaataacttgaatgggtctatccgaaagccggatagccttttttcacatttctgaacttatcacttgcctgtggggacattgccttcacaaggtgtgccctttttcaggtaaaaaaagaggattttttactatgtcgaagtggtacgctaatcgtttgcatatcactggccaacctgaccaactggatgccctgcgacaatggggattgggagacaaaattccctattacgggcaggcgatccatcaaagtattaagctgtttgtcgcgggctgtgctggtcttctgcaaccgactgaaacaatagattacccactttatccagcgctggtagcgggtggagtgggtgaaatgtcaccggaaaattgggcatttgagcaatggctggccttgttaaaagagaatgttgcgcttgatgaagtcactagccaacagattgacaggctataccaacaaagtggtctggccgagcgaaaatgggagacgttgctcccgacagcgcagaaaaccatcatggctttatttaaccaaaagtcctgtgactggttcggtttggttgattggaacggagaacgtgacacggaaatgctatggtctcatcttgatgacaggctgacagagacggttccttgtgacttgtttctgctgataccgacccgtcttgcgagtgaaatcaatggattttacggtggattgttaaaggatcacgagacgactcatgagttgtatttccgattatacggtatgacacggccgcgaggttatgatatagcctggaagcaccatgatgatggcagtctgaccgggcattttgacaaaacactcagggagccgtggtatgaaaaaatcatagttcctttatccaggcaatatcactgccgtatcacccattattttaaggaggtctgtggctgttgtggttacgacaaatacctgaatgggcagtgggaagcgggtattattgatgaactggaatttggtgaggaagatgaggacggtacccgtaaagtggtcggaccggactacattctcggcaatatttcacatgacggttagtgcactgacaatgttatcccgcagggcaatttcttgtggtgaattgacataaaaaaacaggttcaggtttacctgagcgtctgataacgctattgccggcggatatgacgccggcgatttacccattggggaatatttcctctgagggggcgtgttccccccttttctcaggaacacgttttgtctgtattgattaatcataaaggcgatccccggcgagctggtgataggtaatgcgctgacaaatgaacgtcatcgggtcatgtatactccggtacactggctggggaactggtcgtgtcgtctcaggaaaaatcgtcagcagcatgaagttcaaacggtttgagacactggattaagccaattccggctcttgggccggagttttatccaacaggacggagatgaaaaataaatcgattgaagttgttttgtttatccctgacacgttttggtctgaatcggtagtgcttcccagaggcactggacacattctatttcccttaatcctttcttacatgagccgccatgtgccttttgtacttatcatgactgattcaacgaaatgaccggatacacgctgcgtttacccgtgacggaattggaaacgtttgaatcattgcgtgtggttttcatcgattaatttttattcccggaaaagagttttgctttgtccctgccagaggatgtattagggttttgggaaaaaagaggagattaatcgtgttgaaaaaaattaaaatcctgctggcgggaaccgccgcaggaaaaaagtcacttccacaacccaccgccatcccaaaaacggtcaaagcaggctactttttgccgtctgagtccaggctattgctggatatttcccggcgacggcagtgtttacagtgtctgtgggacaacagtgcattacctaaaacacactatcaggcattgtggctggctccgttacatgagtgtgttgcattgatgcaacaacttccggcagcaccgcaggggccttatgcccacccaggcggcttgatagatgtgactctgcaatgtactgcctctgccgtacgtctggcgaaaggacagatgttaccgccgggggtggcccctgaaacgcaggcagaacaaagtgtgatatggaacacggtggtgttttacgctgcgttatttcattttttacctgttttggcccagtttgacggggaactggatgaaggccaaccctggtacccgggatgggttgtgccgcaggggccgtatcgtttccggttcaaaactcctcccgtggagacgagggttgcctgtcatttcgggggggtactcgccgggcggttgttgccggctaaggcgttgacctggctggcgtcagtacctcatgccttgcctgcgctgttctgtattttatccggtgacatgaaggaagatgacgcaatcaatcagataattatagaagctttgaataaagcgggtgcaccgacaatatcagaaatattctctgtcacggcagcatccccgcaaatgattgtttcaggcaatcccgatgtttctgctacgcctttatcaaccgcaatggacagtgttctgccttctcagagacgacaggaagataacccgatgactgaaattgtttcatcagccgtgaggccggttgatgagatttcttctgccgtcatgacagtcgcaccggagaaagggggacagtcggatgggagcacgcaacagctattgtcattaatggggatgaatgtcgcgggcacagtgacagaacagattatggcgagtgaagcggaaatcgtaccgccatacacatcaatgccttcacaacacgcggttcaggcaacatggcagaacgaaaatgcgattgagacaccctgtattggagagcaattctgggactggctgtccgctggattaaggcatggggtaatgaccattaatacgccggaagcccggatacatctggtcagtggttttgtgtttgtgagtgcgctggccattttcttccagtttctcagtgagaagaagcaggtggatggcaaggaggttagcgaaaaatggaaacgggtacaaaccgcatttgagcggttgggacgacatcgagtcagtggtggaaagtatttttgttgttgtcatctttatgattcggctgatcggactggctcctatcaacgtattcatggctacttaatcaaaaacacgttgctttatcgtgaccgttctgtaccagaggatagcccttttctcatgatttcctgaaaagcatctttaataacaatatgttattttctgcgcccggcaatgggtttttaaattgatgaagtgaggaagtagagatggacagtatgacctgggataacctgctggatgagtatttttttgctagaattttgcggccggatacggagtcgagttatcgcaaggtggtgaatacatttaaggtgtttgcaggtgtcagcaatcggccggctcaagtgacccgacaacaggtcctggcgtggcgcagatatgtgttgcatcagtctggcctgaaaggtgtgacctggaacagtaagattgcgcatatgcggtcagtgtttaatttggcgatagaagaaaaaatactgccccaaacggaaaacccatttattggtgtagaggttaatgagaacaaaaataaaaagaaaacattgaccaaaaaacaactgacaaccttgtatctcacgatggggcaatttgaagagcgggaacgacggacaggggataatcatcgtgcccgctgtgcattatatccgacctggtactggctgacggtattggatacgttgcgttataccgggatgcggcaaaatcagttattacatatccggctcggggatattgacctggatgtgcgccggattattctttgctctgaggggagtaagaaccattatgaacaccaggtgccggtggtgaaatggttgtatccgcggctggagattttgctggaacgtgcgcaagccgctggggcaaaacccagtgatcccctgttctgtgtgaactattttaccgccaaaacagacagaggaagtgaaactgatcaattacagacgataaagtcattctttcgtcgtttgtcaaaggagtgtggatttgatgtgggcccccaccgtttccggcatactttggcaactgaactgatgaaagcgcctgatcgtaatttgcaaatggtgcgcggattactgggccatcgcagtattgccacaacgatggaatatattgatatcaatctggatattgccgggcgcgcgctggagcgtgagttgatgctgtatattgatgttgagccagaaagaggcgaaatgctaatcggataaaacagaatattctcgctgttgtctgaatttgcctttttctacataaataattccctgttgcaagatggggaatttttttgaactgatgcagtctcccagaattaaccttcttctaaccaatcaggaaatctgaagaaccgatatacaacatcgtgttaattaattcattgattttagtttggatggcttgacagttgcaatagaacttgtaagtattgcgctcagacggaaaaaggacatctgatttctcagatatcctaatcctagaacctttatatttatatccaagtggcgcaaaactgatcaatctacaattatgcattccaggttctgatatcgaacgcccgtcgagctttcatctctcaatcaacgcgctttgaatggtgcccggaggcggaatcgaaccaccgacacgaggattttcaatcctcgtgctgagatgttagtattttgtaatcaatgcgagaattttgtaattaagatactgggttagtacttttcatatttcgaattacttaaattcgagtgtgcaaaatgaagatacttcccgtaatttctcctaaaggtggcgaaggtaaatccacacatgccgccaatgtagccggttttcttgcagatgccggattcacaactctccttcttgacgctgattattctcaacccacttcaagcagtatttttgcacttgagtatgaagccccagctggtttgtatgaacttcttatgcagactgctgacctgggtcagaaagaccagattatttcccgttctgttataaataatctggatgtcatcatttccaatgatcctgatgaactcctgcctacggccatgcttcatgcgcctgacggacgtttgcgtctgaggaatatattgcagcaccctctgttcagtcagtatgacgctatcatcattgattcaaagggcgctactggtgtgatggccgagctggttgtgctgacggccactgaatttgtattgggtgtgattaagcctattttgccagatgttcgtgagtttctgcggggatcgttgcgtatgttgacgcgactgcaatcgtttgagaattatggtattcgattacctttaattcagatattggcgaatggtattgaaggcactaatcttgaccgcgatacgttgaatgaactggcccatattatcgagcataaacgttacgatacgtcctcttttggtgggcgaagagtataccaactgctgaaaacccgcatcgacctgctggatatttataagttggggcatgtgcgtgcccaacccgttcaccgtcttgaatacaaaacctcccgtaaaagccccgctgccgcgcaaacaatgcactgtctgtcctgtgagttgttccctgaatggcatgaacagtttgatgcactgatggcgaataagggggtgaagaatgcgtaaccctttttctttaccggatggtattgaacaaccgtattcttgcgatgctgaacaagccgttcttggtgggttgatgctggataatgatcgatgggatgaaatcgtaccactgatacatgctgatgattttttcctgcccgctcatcgacggatttatggcgctgtcgcaaccatgtttgcggccaatttgcctgttgacgtactaacgttgtctgaaattttagagcaaaaggagcagctaaaacaggttgggggatttgcctatttagctgaacttggcaaaaacaccccgagtacggcaaacattgttgcttatgcggaaattgttcaggcgaaaagtcgcttgcgtcagttgataatgctgggaaatgagatgagcgatcaggctggccatcctcgtgctgattttactgacattaccgaaatggcggagcagcgtttatatacgctgtctgagcagaaagctgtgcgccaagatattagcttgaaagaagggctgggtttgctgattgaaaaattagagcaggccaatggaggtaatgggataacgggtacgccgacaggctttagggaactggatacaaaaacctgtggtcttcagccgggcgaccttatcctgctggccggtcggccttctatggggaaaaccgcactggcactggctttctgtctgagcgcactggagagtgctcctgatgctgttgctcagatttttagtctggaaatgccgatggatcaattattgatgcgtatggtgtccatgttggaacgtattccgcttgaacgcctgcgtagtggattaatggatgatgaagattgggcacgggttagtagagcaatggagacgctaattcaatgggaaaatcggctgataattgatgacaacagttatcagactccggctttattacgcgcccgtgcccgcagaaatgtgcgcaagtatggtcgaccttcattgattatggtggattatctgcaacttatccgaagcccggagcaggaaaaccgaacccaggaaattgcagaaatttcccgtagcttgaaagctctgggtaaagaattgggttgcccagtactggcgctttcacaacttaatcgtcaactagagcagcgtacagataaacgtcctaataacggtgacttacgggaatcgggggcgctagagcaagatgctgatctgatcttgtttgtttaccgggatgaagtgtatgacgccaatacatcggatattgggatagccgaaatcattattggtaaacatcgtcaaggatcgattggaacagtcaagatccagtttgatggtgcctgtacccggtttagtgatcttacagagaggtattatgatcttggtgctaaaaggggaaatatatgagtaagcataaaacctctctaagcgatgcaatacttcaacgtggcaaaacaccacaatcaccaatcagtactgttgttttgcctatggcagaaatgccaatggtattaacgttggatgagttacagccaaacccggataatcctcgcctcagccgtaatccccgttttgacgatattaaagcttctgttcgtgccagaggactggattctgtaccgaaagtgacgcgagatccggaagacagtggaaatgtttacattttcagtgatggaggcaatacccgttaccaaatcctatgtgaattatggaaagaaacgggtgaggaacgttttttccgaatcccttgtttgtttaaaccctggcctggtcggttgcagtgtgtcattgggcatctggcagaaaatgatgttcggggggatttaacgtttatagagaaagcgcttggtgtttttaacgcaagttctatgcatgagaaatgtttgggaagaccgatctcacaacgagaattgacagatttattaaaacaagaagggtttccaatatcacaaaccagcatcagtcagatgcataacacggtgcaatatttatatcctcatatgcctaatttgttgatatcgggtatggggcgtccgcaagcagtaaacatattgtctttacgagttgatgctcaaaaaacctggaatagtttttcttcagaggcatcgtgtgggaaggacttcgattcagtttttggtgaggtatgtcagcgctttgataatcctgaactctattcttttgacatgctacgggatgaactgattggggaattaataaaagctttgccacatcctgcccttaattatgatcgctggttattggagctcgatcctaaagagcgaaaccgtcgtcagttgtttggtgagccccctcctattgctgaacatttgcgcgatgcggatagacaagccgctgaagtgcctgaaaagtcggtacctcttgtgactaaaagcgctgcctgcgtttcggcagtggaacctgagtcgcatggggatgttatcgaatgtcaggaagataaaaagaccgaggaatatgaagtttgtccgcccaaagttgaagttcagcctgatgtgtatgaaactcggccaactttatccagtgagttgtcgacaatacaggataaggaagatattgcgcctttagtatcagcacctttatcgcagatagttccctctactttaagtgaatttaatcactgtcttccaacaccaccacaaacttcattattaacagagcctacgccatctgatggattgagttttgcacaaactggtctggagccagttagtgatatctggtctatctcaccggtacgagatgatattgagcatttacaagatatggcgtttcgtttggcattcgagttagccgaagaaatgggaggagcggatgagcttgaggaagctaaagatacggcctgtgaaatgggttatcgattagcttattcccatacggcatcacgttttgtacaggtgctgttgtcgttgacgggggagagtgaccataacggtgaattggcagatacaggtataggcatgttgggaacctggtttgtcgggtctgacaaggatactccagtattgcctgatgtcgcagtagtgaaatttatgcgtcttattcgggtgttgcgccggttacgtgaactgcaacgtgagttgtcggtagtctcagcagaagggaatggcaatgtctgatgatattgatgacacgagggctcaggctgttaccgcgatgtggctggaagagcagatcgctgttgtacggcgtgagatgcataccggtagggtgtcactgaaatattgtgaaggatgtggtgatcggattgatgagcaacgtcggcagattttgccgggggtccagttgtgtgttggatgtcaggaagttgctgagcattgggaacaggtcagatgtattaccggaggtcatcgtggtgggtaagttcagatcttatgtgttccaattttgttcagacgtatcgtattgcattgagagaggtgccttatgagccagatatcccaggtaaccaatgccttgttaactcaactggtcatggagttgaaatcgggttatctccgccgctgtgaagcactgggtttgatggacgaagaaatgcggatgttacacagtttgactgtggaagacttgcattatctgatgaatagcccggtgtcagtccttacgctgcgtatccatcatgaaaattttgcgttaatgctgcaacaagcccgacgtgagcaaaaacgtctgcaacgtcttgatcgggcactgatgttaggcggctcaattgaattgatgcaacactactttgggttgacttctgttgaggtgagttcccgtcgtcgtatgttagggattgaagctcgccagggtcgatgtctgatgctgacagataaagacagtgctgaggtctggcgactgtggaaagcgaatgtcactgatctggatagtgcggatgggctggatgtgatgatgcaggccgctgaacagctggtcgtgtcactgacggcagtctggaatgctgtacgtggctggattgaagacgaaaagaacacagtaaaacctgaagttggtcagggacggcaagacaggtgaaaaagacagagatcactcaggggttgttggccccctgttctgtaccactcgtctatagaaagaaagcggtagaacaattgaaacgttatcgacagggtagcaaaaattacactcggatcagggcgaaaggcaaaggtaaagtttctcatcgttgcctaaaaattgatattggcatgttttggcggttgttaagtcgtaacggaggacgagattgggaaatgatgacacatgagcggtacaacaatgaaatctggaaataacacacggaaggctcctttgtcatctgatagcctcattgcttttacgttggagcaaatgaatgcccgactggcagctcaagctgaaggtgatgaaaaaaaacagttgcgcagtgggctgttgtatctggggaacgtgcatgatgctattccccgtcagttaattctggatacccgattatctccgctcgataagatggcctggataatgatacggctgtatgcacaacaaaatgcgggagcggtcttccctacctatgatgaactgcaattgcaactggcctctccgcacagcggtaaagcctcccgggaaaccgtcagccgggtattgctgatgttgcgaataaccggctggctaagtttgtgcaaacgcgtcagggatgaaaaagggcgcgtgaaaggaaacatctacgcccagcatgatgagcctctgacatttcatgatgctgaagcgcttgatcccaactggctggacacggtgggggaggcgtgtcgccacaaaaaccgggtgattagtcagactgcttggtcagtattgatggaagttaaagatgatccgatgatgcggcatcgccgttcccgaattgctttactggaaaatcggttaggtcaggtacaaacgccgcagcaaatggcggcgttgcaagcaataagtcagccaagttcggtaaccgaacttaatcccaaaggccagaacagactaagttcggaaaccgaattcaatacaaaaacaggggatagtaatccgagttcggcaaccgaacttagtctaaaatcaacgagttatgacagagttcggcaatcgaacggttacgtacgtcatttcacacacagtgtgaataaaaatacgtacgtagccccatcggatggcgacaacccgattgttgagcatttgttgcctgtagcgttacgaaatcagctttctgatgacgacatcagaatgctgacggaacaactccaggcacttccgtctgatcagaggcatttggtgttggatagcctgcgagttccattggaaaatggctcgttaaaaaatccggtgggttacctactgacactgatgaaacgtgccagacagggagagttgagaagccccggtacagcaaatcagggggaaaaccccggcatgaaaaagcctgttcctgccagccgtcagaaagacagacctgttttgccagaggtgcaaagaaaggccaatcctgccgtaatgaaaaaagtgattgctgaaatccggcagaatttgatgaaaagataaatagggtcactttggatgagtcttaaaggggttatagagtcaggcattccgaggtatatgggtatttttaaatgtcatcaaatagataaaaacggtgattagagtctaatcatgggccaaaagacatacagtgattagagtctaatcattatggttatgggatgttaatcaggtttttggggggagcaaaaaagagttttgaattgtggtcacagcctgataacgcaactatctcagcgatatccttatgtcacagagagaatgtaccatgactgaaactaaagagacacatgctgttcgctcaggcgcactgcattcctcacttaccattgagttgcatactcattacgctatcagcctgtggaatggccgccgggatgaaagtagcaaaaagaataaaccggtgattattagcatgccgcgatttttctcactagccggtcggatcagccaggattccctgatagataatccgtatgccgatatggcgatgttggcactggaaactaagcttgcttctgctcatgaccagatgcaggcggcgttagcggaactggcggctacactctcgggggtacctgctcaaatccatttatctgagattgcctctgtcgctccgctcaatattggtgtttacagtcgcactcctttgggttaccgctgtgtttggttattagtgggttacgatcaactggtgatgaaagccttgcaggcgcaccattatgcgctgatttcccgtcaacaatgtgacgggtttttaaaaaaagggggacactgggtacgccaaatctacggtgctgtccagccgtaccgtagttttgctgttactcgtgacgatatcctttcccaaacccctgccggcagggaagctattacccgtttggggctaccggatgaggccgttatgcggggcgaaaaacgttctgttttttctcctgaattaaaaagtacggtaaagcagaaataagcgatgaaactgtttctgtgtgaaaaaccgtctcaggggcgggatattgcggtggtattaggtgcaacaaagcgtgggcaggggtatttaactgggccgggggtgacggtgacttgggcagttgggcatttattggaaactgccagtccagaagtttacggtgaacaatatggtgctccctggcgggcgtcagtgttgccgatattgccggcctcctggcaaatggtggtcaaaaaggagacggctgaccagtttactgttatctgtcgtctgctgaaacaggcagacgaagtggtgattgccactgatgctgacagggagggagaagtgattgcccgggaattactggattattgccagtttcaggggaaaatatcccgtttgtggttgtctgctctggatgaggtgagtattcgggcggcgcttgctaatattttgcccggtgaacaaacggcatcgttgtatttggcgggactgggacgagccagagctgattggctcattggcatgaattttacccgactctataccgtgaaagcccgtgaatgcggatatagtgacattttgtctattgggcgtgttcagacgccctctttggcactggttgtctttcgagatcgggagattatcgcctttacggctaaaccttattggcaggtggtggctgaccttcagtttgacggacgaattttccgggcggattgggtacccgctgcgacctattgtgatgaagaaaaacgctgtattcatcagaatgtggcacagacagtggttaagttatgccaacaaactggtacggctactgtcctggaaatcaatactaaacgggaaaagcatgcggctccgttggcatttgatcttggtagtttgcaacagttgtgctcgaagaaatggagcatgggggctcagcaggtactgaatattgcccagaatttgtatgagacgcataaagctacgacctatcctcgtacagattgtggttatctgcctacggccatgcaggcggaaattccgcaagtattggatgctgtggttaaaagtgatccggctatgcggattgtggtagatagtctggaccggacgttgatttcgcgtatctggaatgacaaaaaaattacggcgcaccacggtatcattccgacaaaacagccctgtgatatgaataagatgacggatgatgagcgtaaagtgtatcagcttatccgtcagcattatttgctacagttccttcctctgcatgaaatggatataactgaagcgacttttgatatcggtgggcaattgtttcgtacccggggcaatgtagtgattgttcctggctggaaggtattgttttcagcgggtaaagatgaatcggcatccatcgggaaagacgattctttgggagaaagtttgccgtcgatggtcaaaggcaatcaatgtcaggttaatgaggctactttacgaatgttgcaaactcagccatccgctcacttcacggagggcacactgattgcggcgatgaaaaatgccgctgcttttgtcagtgacccgcaacttaagaaggtattgaaggacaatgccgggctgggaacggaggctacccgggcaggggtactggatacgttgtttaaacggggttatctgacaaaaaagggcaagtatatccacgctacgcagattgccagcgagttgatagccgcgttgcctaccgcgttgaccaaccctggattgactgcattgtgggaacaggcgttggatgatattgctcaggggcaagcggaattgccggattttatggctcgtcaggtccaatggacccaatacttggtggagcaggttcaggcgcagaaagtcgtgatcacgccgccgccttcattgccttgtccggtgtgtggaggcgtaacgcgtcaacgccagggaaaaaacggtgttttctggggatgtataaaatacccggaatgcagtggggtagtcagcaccgtcgatggaaaaagaaaaaccagatctgcccggcataagaacataccgaaaaaaccggcaatgacagggtgagctgattttttgttgtgtacctaagctggagatctgggaaggtaaactggctttggtacattgcaccccacgactgcggtttgacaggcaagtcgtgcatagattttctctgttgtcagtccggtaaacggcttcctttgaagggttggtaaatagccgcgccgggatagttgaatgtccctggagtttgttgagactacttagcttccaaccttgtaccatatgccagtgcagattccttgccgtcctttgggcggcgctattttttaccgcttcccaaaaatcattttcctcgttgacagtctggccccctgattcaaaaatgcgtgggataacttgttgtcttcggacaatcgccaatattcccgcagtctgagaggaatgcctttgggtgactgctctcaatgtcagaaaggtctgagactgacgctttcgtgtgacctgtcacaaagccattgtagcctgagaggtggtgcctgcgggcggtaaacccgtttatcctttggaaacgggtatcactgataacagtgatgaaggtgtatttttaacttatcagatagcctgtgtttgacactggcttcccggcgggaaacatcacttcccgccctgggtgatgtgttctccgtcgtttctttttttcacttcatagagagaacatcatgtctgcaattaccactgaaaataaatatttcaacctgaatatcaatggattggggtatctcagcaatgtccgcaaggtgaatggtccgaatggcagttttttcagcgcggtcatcaatgcattgagtggaccaacagagaatccgtcttatgttcgctttgatgtcactgttgccggtaaggaaaacagtgacttaatcagccgctgtcagaaagcggttgatgaggacaaaaaagtcttactgggtttcacattaagtcagccgtctaccgggatttttacgttgaacaagggtgagcatgccggtgaacagcgtgtcagtttaagagcgcggttgattaaaattgactggatcaaaatcgggcaggagatggtttataaagctgaaaaacctgaatccgtgccgcctgtacagaataagtcttcgcaaaagcattatgcagagaattcattttgactgcccctgaagtctctccggagtgcattttttcggggaatttttttcatctacattttgaaagggaagttacatggcttcacgcggcgtgaataaagtgatacttattggacgattgggacaagaaccagaggtgcgttatcggccagagggtgatacagtggcggtattgtcactggcaacatcggaaacctggcgggacagacaaacgggtgagcagaaagagcgtaccgaatggcatcgggtggtcattttcggcaaactggccgaaattgctggtgaatatttgaaaaaaggcagccaggtatatattgaaggtcagttgcgtacccgtaaatggtttgacaaggcgagtgggcaagatcggtatagcacggaggtcgtgctcaatcagcagggtacgatgcagatgttaggggggcgtagtcaaagtgagccttcccgttcaagtggtcgggaacaatcgcaatcctcttcgtcagtgccgccccgaggaagtgaaccaccaatcgattttgacgagttgatccctttttagagttcacctaagagttaaaaggtaagtttttttctgtaatgccccgattatacggggcttttttgttttttatagttgtgtaaaaagtaaaagtatcttgcaggcgaaagtcttgccgcagtaattggtatgtttgattgtgtggctatggcgtacgtatgggagggtgactgaagcacgggagcaacgttggataaatgtgtccctagacctagacagtgggagcacgcaagtatgcagcaagtgaacctgaacgagcttcgtaaatttcagccacacagtgatactgggaaagtgtggtgtagggtggttccgtcgagtctgtagaacgggggcgaagatcagcgaatcatgacggattaacaaccaaatgaagtcatggcagggatccggggtattgaggatgggatgcatatatagcactgaatggaacgaacgagacctctacctgtcatggtctaacctatcgcgtaatcaacgatataaggtaaccgctgaaattctgagagatgcaggatagaggagtcagagatctttcaatatcattgaattaagacatttgtcacgaaaatggctattaaaactctcaataaatttgttttgtgtgagcttacccagctgagtgattctcagttcagcactgttatgataagcccattgttcgggtgtacggcaaggtaaaatcaggccccttggtcggtccttatcacaaccgatacgggtgtcacagatctcggagcaggactacggagacattatcttcaggtactgtctttttgtttatcatcccactgaacgcgttgtggagagaggcttcggtctgtatttcgtggataaacctatcatcgaaatgggaccagaagccatcagtacacataatgatggcatcatgatatgtgcgttcccgttctgaccaggtgagtgtatgtttgctgtcagcaccggcaaactgagtgagctggttacgcagcgggtggtcacgaagtttttctgctgggcagtttcctcggtcaatacagcgctgggccagtgaatggtcggtggttctgaagctgtgtgagggccagtaaatccgtgtatcacccagagtggcatagcggtatttttcttgatcagacacgataaccgcaatactagcctttcccggataacagtcattacagctcaggatccggaggacttctccgcacagctcgttgcagcaacttccggtattttccagtgcataaagttgttcacccagccagtcaacataatgcggactggcatggcagtggctgaatccatctgccatcacggagaccgaacatacaccagtgttgataaagaaaaatctatccagctgctcgtctcgttgcccctgatgacacagatacaggctattttgcaacattctgccaacctgttactaagtcccaaggcagggatttatagaaatccacaatacgtgtataggcggtatcaaagtccataagttccccttcgacctcgtctttcaggagttcatattcccgtgaggatcgttcacgtatatccactctgcccagggtttcggggttgaccattccgtcttccaagcgaccggtggatttttccagtagtgtggtcagtatagccaatttgtccttgttttcaggttggatgctgtctaaaagcagattgaggtcgtagatgtcctgacgacgtgaacggttacggacaatctgctggatcactgaacgaattttctcggccacaagatccgtgaagctgtaagcttggatatcgttgtcatctgttagggtgatgtgatcaacattcaggctgtgttcattcagactgtaatcaatcttgacggtatggggagattgtccctgtcgcagacgtctcatttcaccgtcattgttgttcctggcatatcctattttcagtctgaaggacggaaaggttgcctcttcggtattccttggctgaatggaaagactttgaacggcacaggtcacttgataaggcaattctgcggaagaaatggctagggcatcgtcgagctcttcatggaaagtctgctgatctatatcggcaagtcgcatattcgttgagaaatcaatatcttcagtaaatcttgaactctgatatctcaggccaagcaggatcccgcctttcattatcatttttggtttcaggtattcattggaggcaatggcctgtagaactatatgtacggcctggcggaaggtgatgcggtcctgtggcgcatcggcgatccagtcttctatagagtattccatatagagtatttatcagttgttgatggatatacaccatacttcggagtatgtctttttgtaagggtttgatgctattaatttacggcttcctccacgctgaacagtcttcttccatgtttcaatcgtgcggtgggttagtccacagacttcttccagaaggtaacctaccctggctttatctataccttttccatttttatcaactgttttgacgattacaggcaggtattcaccagcatattcacggaacacatcctgtacatgcgagaaaccgccacacagatccggctccctgagcatatccagaaaggtttcacctatgttacttacccgaatcccaccggagtcatggagttcctgcttttttctgtagtttctatgggtatggaaaatcagctccttgccatcgattttttcgtatggagtgaacccgcggatcatcagaggttgcatgttgcttatagcggggaaatccttcagtaaatgttcctgataaaggctccgggcagtattaagaggtgcttggatcaggtgcacaatatgtggaatacgatcggtgatgccatgccattccattgcggacagataggcaagatgggagtaaggtgtgagacagcaggcaatctgctgagcactcgcttggtttttgttactgatttgccagataaaactaggaataatgggtgacagaattccctgattaaccatgtcttccagagcatcatccatgattcgtttgtccggttcagttgcctggattttgccaatgcggataccatcaaacatcctgtcacggtagagcatgtagatatacatattgagttcatgaagagcaattatcggtttaggatgatagttaagaattatgagccttagtgcatctcgcagtgaagttgttttcttcatatttaatatgatacctgtcaatgtataagtcctaaggacttatacattgacagatgtttaatgtcaagttttaagacttcgaaatgagactgtaactgcatgaattaaagggaaacaaaaaaacagcttgacaacatgttactattacaacaacaatgtcctaaggacattgttgttgtaatagctgataggggttgtagcgttgtcagtcagctaaagtggtttattgtggttactatagcgctcttgcaacaaccaagagctgaaatggttttgatattactgtttcggcaggaaaaaatgaccattaaaaaatcattacaccggtggaatttatccaactttaccagaaagacgaagctctctgattgagcttggtattaaatttggggaaggggccaatttactcgcactgaaataattttcagggaatggtgtcatctattatcatgatgttggggggcagtttattcactattgttggttactgaccatcaacccatcaaccagaacttgtaagttttgtttagaaaattcactttaaattgacaaaataatttacgtttcaagatctttcattaacctaatgaaaatattagtactttttgattttagatatccattagtattcatagccgttctgaatggactgaaaaactgtttgatatcttgcaggtaatagtcctgtcgccgtagttggttagtttaacgatgtagctatgtcatatgtgtagatggtgattgaagcatggaaataatgccgaacaagttccctcctaccacagattgtcagggcgggcaaactgtaacgaaagtgaacctgaataaaccgtaaatcttaaccacacagcaaggctgtgtgtagagtaatcggaagcacggtttgatgagaaaccgctggggaggtgacttcaaaccagaggcttactctatgttcttgtcttaagggattgattgttgttattacgataagttcaaaaagattccctattttgcaacagggaatttgtgtagatagaaacaggctttatgtccgtcttttccacctattctacttcgatcgaaaattagtccaatatgttggagaaaaacaaggtttgatcctattgagtgtgcgttgccggtgttctaatgggttgcataataaaatgtagccccaaggcgttagcaacctttgtgattattgtgaatgtagggtttcccttgccagaaagggccttgtaaagcccttctcagttcattccaacatttcttgctagttggctgatgttacgggctcgtactatgtcactcaaagcagctgcaataagggaaggatcaccatcttctatcacagcttccagatacgccgcagtatcttcttctgtttggagataatcggcagtatcgtagtggctgaattttacttcttggcttttcatcggttactccttccattgcgtggcaatggtttttgccaattcaatagcgtgggattggttgcctttatcttcaccacactatgttgcagtttaatattctagggcaattcaaaagcctggttactcacagataccgagaataaccctatgcgaatctgacaaaagtgtcaaaatgcgttgacaaaatctacgtcaggcgtagtattagctttaacaacgctcgcaatgttcccttaggggatgttagtgggcttttttttggcctcttttttccccttcagggatgactgctaatcatgccttatgccttctatccaaagccgtatcgctcactggggggatcttgttgccgatttacaggctaagtatcttcagtttcagaatactgccgatgcagaacaaattcttagccagataagctatcaccacttcaaaatttacctgcatctgttcctcgatccggctagccccggtggcaagcattaccgtccgacagcgttctttgagcatggcgttcagatttaccggtttgatgaagagctccgagcttacctttttaaggtcatcgtcggactggaagttaaattacgcagccgtctcgatcacacacttgccgcgcacagtaatttataaagctaaatatttcaacgggacgtatgcatcttcttaccgttgcgccgctacagacgaatcgcctttataatgttctggtagtcatgaatcagatgataaaaacactcggtattaccagcctgaacttttttgacacgattgatgatctgatacagcgatatccggcgattcagccttatctgcgtagctctgggtttgctcataactggcaggcagatctgttctggcattaacttttcactctgacgaattgactcatctgacgcactgacttcgattggtgcgttttttttgattttgtaaaaagagttctgcattgagcacagtcccggatccccgcacagtaagccgcatttaggatcacctgcatgggaatgcgcatgaaaaaccctgtttttttctcactcagttgggtgctcgtcatggtattagctgggtgtgccggacaaactcaggaggctaccgcatccggtgtaagttttcaccgttctcatcaggcaagtcccgctgtatccgatatctattctctgacaccagaagttacacgctatgatcgctataccttggtgagtgtaggcagccaggctgtgcagcgtgaacccctcaatcaaatcatcaatatcaccatgccagtaccattggtacaacgcattggtgatggattgcactatctgctttttggaacaggttattcgctgtgtgataccaccgcaacccatttcgttaaattgataggcagaccattaccggctattcaacgcaaaatggggccgatacggctcagtgaagcgttacagattgttgtcgggccagcatggcgtatccgggtagatgaggtgaatcgtgaagtgtgttttgttttacgtgatgaatatcgtcagttttccgagacaacggttggccggataacacagcccaaaatgcgggtaccgttgcaaatagcttcttcaccggcgttatcggcatctacattgtccaatagcacattagccacgccgttaccggtgaagcccctgatagctgaaagaccgaaaacagatacccttcaatcttctgtgacaggagggaaatccacaaccatttcttcagtatcacctactcagcccattaaatccctgctgagcggcagtacaccagtggcaacggtaccgataggcaacatctggcgtgcggaaacaggaaccactttgcgtggaacgttggagcggtgggctaatacaacggattgcccggtagggggacactgggtagtggtgtggtcgtcaccgacggattaccgcattgatgcgccgttgatgttcaaaggcaactttgagtccttgttggtacaagtgtttgatctttatcgacaggctgagaagccattgtttgccgaagtcagccgccttcagtgcctgatttcagtcagtgataaaccggtgacccggtaagccgtcatggggtacgtcattagtgcgtttgccttggtttttctgttgattgcagggggtatacagctgcgacaggcagaacaactgcatatcgatcgtgacaacgcaagggctcgaatactggcagatcaaatgttgctgttagccagtgccattaatcactggcgtggcggctatgcatctaaaaatggcacggtggatctccgtaagctcattctgccttttcagcctgatgcccgtatccggcatgttatcagtcaaggccggctctgggtgtggatgccggaaatacccggtcttgtcaccgctctgcgcgaacgcactaaggggtccatgttgattggtgaagtccgacagggacggttgtatggcttatccggccaggcaataggattcactcttcctgacgggattagcgatggtgatgtggtgtatttcaactgaaaaaacggacaggatgtgatgaaaaataaatggtgttcactcaggctttgtacttgccttgctccactggcggcggtaacaggcatggcgctgatgtccggttgtaccttgccggcagtggataatatggcgcgtgaggccagtgtgcaaagtcgggtagcacaacagcatttgcatcaacagcatagcctgaaacaaccgggggtaacctgggtagataaaccctgggtgaatctgaaaccggtagttcagcctgtcgcgtcggtaaagttaccatcctgtcagataacgattattaacagtaaagtcgggctgacattaccggaactaggacaacgcattacccaactttgtggtattcgggtcacggtagcgcccgatgttttatcacgagtatcaaccacggcgggtgggttgacgcgccagatgaatagggcattaccgacagctgatgataaaggacgtatgccattggattggctggatgatcgagatatacactcaattaacgctgatgagcgtcgagagccagaagtcctcacgggtctcaattggcaaggggagctgacggggcttttagacaatattgccagccggttagggattgcatggaagagggataacagggcagtcgtgttttatcggtttgaaacccggacatttcagttgaatgttctcaacacccgtaccagtagtaatgccagtgttgcctcagggtcaaccagtagtatggggacatcagggggcagtggtaatgtcaacaattctgtctctggggaggccagctcttcacagaaaaccacggttgatctgaacagtgatttatacgaagacatccgtaagacagtcgagaatatgttgacgcccgagcgtggtcggttctggttgtcaagctccagtggaacgctgatggtaacagacacgccggcggtactggattcggtatcccgttatgtggaagaacaaaatactgttctcaaccgtcaggttttgttgaatgttcaggtgctgagtgtcagcactagccgtaaagagcaaatgggactggactggggattagtttataactcattgcataatttgggggctacgctgtctggcagttttagcggtatgggcagtgggacaacgtctgcgggtgtcagtattttggaaagtgccacagggaaagcggcaaaactctccggttccagcctgctgataaaggcgttgagcgagcaaggtaatgtcagtgtggtgacctctcaaggaagtgcgaccactaatttgacccccattccgatacagatggctgatcagacggtgtacgtggctcaaagcagtacaacgacggctacggatgtgggagccaccacagctctgacgcccgggatgatcactaccgggtttaatatgactttgttgccgttgatacagcgtaatggggatgttcagttacaagtggcttttaacctgtctgatccgccgactatccgttcattcacatctaaagaaggcaattcttatatcgagatgccgtatacccggttacgttcactgagtcagaaagtgaatctacgtgccgggcaggcgctggtactcaccggatttgaacaggctgatactcgggtgactaagacgggaacctttacaccaggtaatttcctgcttgggggaggacagtccggagagaatcagcgcagcacgttggttattttgatcacccccgtattactggattgaggaatgaaaggctgcatgaatcaatgaaaagcatcgatttagaaatatccggtgagatacccgaagtcacggttgtaaaggccgatcgccattgttggatcggtggcctgcgttggtcaccgtacgtgaaagtaaaacggggaccccgcagaaggcaacgtgttcgtccggtagccagtcgatctcaatacatcgatgtacatctggtcgtgggcaatcgttcggggagacgtcagcagactgctcgtatgatggggacgggaataatcaggaaattgtattgccgtcacacaccgtattctttagccatcgcttttttatcgcattccggcccaaacgggtacgggatctatgatttgggcgaagggcaatggttatttttggcaacgcagaagggtttgccgtccgtgatggccgatattgtcggaacccgcgagaatgtcaatgcagcactgtcccgttttttaacgtttaacccggctccagataaaagctggcgggtggtatctgaccctgataatccggcgcattggcgctcaataatttctgctttgtcggctcatcagtatcggatgtgtcgcctgcaacggcggtggcggtcaccattattgttgatggctgtattcatctctttgttgattgtcgtatgggtgttattgcagtcaggaaaatctcccgatgagagattaccgatgactgaaaccgttcaagtcagggcagcacgattgtttgaagaaacgccaaaaccggttgacttacctcatccgtgggccgataagccgttgttacccgcgtttttggcacgttgtgtcatgaccagtcggacgatcccggtgttattggcgggttggcgcttgacggcaggttcatgccgaaaagatggcgtccgccttcactacgagattatgcctggcggtacagcagcgcattttgttcagcgtgtacagagtgtatttaagcagtcaccggtttttgacctggttcagggcgcaaaagaaggccgggtattcctgccgtggaaacctttgccggttcgcaatgaaacggtgcctgctgtttcagtacagttgatgaagatggtttcgaatttccagcaatggcagatccctctgacgttaaatgaacttactcccgcatcggcattaccgggcgacgggcaatctataccttcccaggattggcgagaatacctgttcagcttcagtagtcgggtgatgccagcatggctatttgctgaactggatgatacagggctgcgaatgaacagcctcacgtttaccctgacctcacagggacagttaacctatcagactgagggatacatttatgcccggaaataatactgccttgtggatcagtgtgttaagtgggctaatttttatcagttcacccgtatgggcaacagaagatagcgctctttcggtaacagggatgacagaggcatctgcgggtgtgactgtgggacagttagagcatttacacgcgaaaaatctgctgctggaagcagaattgcagcgggctaaattacaacgccaactgacagaaagtcagcctttggggttgacgggcaataataatatcgatctgccggtgaccgtatcgcctgtgatgacagcgggacaacctgtgacccgtccggtggttcaggagatttatggtcgggggcatgcattgcgggcgagcgtaagcctgccgggccgcggtgtgatggagttagctgtcggtgacgcagtgcctggcactcagttcaaagttaaggtgatcacgctttctgcggtcacactaagtgatggttcggtactcacgttctgagagaagacagggaatgaaagaaaacatccaggttaatgatgccgtgttgctgttatgtgaagaacaacaggctacggtattaattgacaacaatcgtcggggcgatccccaggtccagacccgggtcatgcaattacttgaagccacgccagaagcagaaattcgctttgtcaatttgtcagaattgcaggcgaaccgccagaaacagaatcagcggacgaatgaacagggcgtgtgtctgtcggacctaactgatgtgagtgaacgccagaagcaggtactgacctgttttgaactggcaaaaaaactgaatgcgtcagatattcacctgaccatcagtccaggactgacccgaattgaaatgcgtattcacggtgaactggaagtcgtcaatgaactgtcggaagaggagggaatggcactggcatccacgatcatcctgtcaatgtgtgatgtcactgaaacgcaattttttccaggccgtcagcaggacgggaggattaaagcggattttctgcgtcgggtacatttgtatggcgcccggtacagccatacaccaaccgcagatgggttgtatgttgtgatgcgcgtgattgctgatgatggtgacaaagtgcctacactgacacaattaggttttttgccacagcaaattaaacgggtttcccgtatcttgcgattgccggagggcttgattgtgttatcggggccaaccggttctgggaagtccacgacattacgcactttttgtcgccagtatcttgaccggactggcggtaaaaagcggttattgaccgttgaagaccctccggaggggaggattgccggtgcgattcaaacgcccatcgtgtgtgacaaaagtgatgaagaggcggtcaggcttgcctggcaccgggcgctcacctctgcgctgcgtcttgatcctgatgccgttatgccaggcgaaatgcgagacctgacttccatgctaacggcaatttatgctgcgcaaacgggacatagtgtcatgacgacgctgcataccaatagcgcagtcggtattcctgaacgcatgataaccatgggggtgaatgcggggctgatcgccgacgcacagcttttgattgcgttgattagtcagcgtttggtgcagacattatgcccacactgtcgggtaccttgggcacagaaacaggcggtactggatgaggaacaacgggcttatctgatgcgttattgccatgctcccggtacctgttgcgtagagaatttatattttcgccaccctgaaggatgtgaacattgttgccagacgattaccctgagcggacggattgttagccggggagtgaccggtcgtagcgtggtggcagaagtcattaggcccgatgcgcgattttttaccttgttgatgactgagggcaaagaggccgcgagacaacactgggtatcgaacttaggcgggattacgcgtcgccagcatctactgcataagctgaatgccgggctgattgatccattggaagccgacttagtttgtccgctggatgaagatgattatttgctgatggagccgtgtgatgcgtgaaatgtcatggggcaggcgtctgcgctatgtgttagttcgccacactttcttacccagttatcgcatcattttttatgaggcgttgcgttttttacttgaaaacaagataccgttattgaaagcgttgcggcagatacgtgatgtgtatacgcatttcgatacccattggcatccgtttgctgaactcattgacgattgcatctcggcgctcactgataacagtcaaacgaataccttggaacatgtgctggctgtttggggaccggtagaagaggcggcgttaattagtgcgggtatgcgcagcggtcatttgcctgaagcgctgagtcaggccatgacactgataggttgccgtcagcgtattctgatggtgtcgctcagaatgatgatttatcccttgctgttggtgctactgatggcgggattactggtgatcaccgcaacagaattggtaccaacgctaagaaatattgcagatccggaaaactggcagggggtgctggcatggctgaacggaatggcgacgttctttgagcatgcttttctgtggtgtggtgtcttactgatctcttttattgtgggcgtggcgtattcgctaccgcggtgggtcaaccgtctgcgccgcatagcggatcattttatcccctggtcggtctatagcgatattcagggcgccatttttttactgaacatggcttcccttttgcgtgcccaggttcagacgctggatgcgttaattatcctgcaacgctttgcatctccctggttacagattcgtctggagtctattgctgattgtgtccgcgaaggggatcactttggccgggcattgcatcactgtggctatgactttccgtcaaaggaagcggtgaattttctgtcattactgacggaaggtgatggtacttctgagatgattggacgctatggtgagcggtggctggatcaaaccatcgttcgggtgaacaggcgagctaatttggtcatgttgtgttcactgttgctggttgtcggggcatttatgttgatcctgttggccgtcatggaaatacagagcatggctaatatcctgccgtaatccccttaaattaaacctccttttaacgactttctccgtaaagaaccctttatataaggaataaatcaatgcagtacatgatgatacagaaacaagaccgaatggcccgtccccctgaacggggttgggctattttggaaaatggtgcggtggctctggttgtgattgccgtgattactgtagttttggggggcatttatatgttgtatgaccgcaaggatgcggttgtagaaacaacgaatctgcaaactatcatctccagtactcaggggttaatgaaaggcagtggtggatatgaatttagtcacgcagacaagatgaccggcgtcctgattcagttgggtggcgtaccgaagagtatgacggttcgcggcgatacgactgtcggtaatgccacgctgtggaacacttggggtggtcaggttaaggtcggaccgagcagcacagggggatttaataatgggttcacggtaacttacgagagagtcccgcagtctgcctgtgtttcattagcgactgggatgagccggggaggaagtgcatcagagattactattaataatactcatcacgctgatggcaaggtgacactggaaagcgccagtacagcatgcacaaggaacaacggtcgtaccgggaccaataaactgatctttacgattaatggttaaatgaagacactgattgcggttagctttcctacagaatatacccctctggttatgatgacgttatttgtcatcggatgcgtgctgcttagtccggtgagtaaatttttgcaggaatacggtctgttgatgtgttcagtgcatccggtaccaagaatagctatctgtttgtacgtgatgtcgggcacattgatgttgttatcaccagcgccgctgatggaacggatagccgcactgttgctgctgagttttttgctgcaattatcggttatggatgttttgagtggctggcttcctcgtcagtttacattggcttgcctggtgtccggtgtcttggtcaatatttcgttgccgtcagtatcaataactcttttggctacggtgcttatgcttgctgggatgggagtgttacgcgagctgatgaaccggcactctcaatgtgaagtgctggggatgggggatgtctggctgatgggagcactgagtgcctggctgacaggcttaccggcactgataggttgcttgatgggtctgtccggtttcgtgttgtggcatttggcacaattacctcatcaaggtacgaaaggcgggccactggggccttggcttagtttggggagtgtggtcatgttgttggaacgattatatcagccaatatgggtaatctaatagtgacagaaagaaaggggtgttgtggcagcagcagggggccagggccggataggggatatatgatgctgggcaccgctgccggactcatgatattgctggtactgtcggcgttgggaacccgcatttacaacgattatctgacagagaagtcctggcaggtcatggcggcgcaaagcagtcgtttcagtgcagcatcgaaagcttatattggccgttattatgataggttgcggaattcagcaacgacaacccaaccggtgatgatcaccccggatatgttgagaaaaaccggactgttgccatccggattcaaagacaccaacagttcaggacagcgctatcagaccgctgtagtgcgcaatacccaggatccggcactattgcaggcaatggtggtgacacaagaagggagtccattaccttataaagccctgcgcctgatatcgatggatatctctaccggattgggaggatatattcgggatggcaagaccgctaccggcgcaatgagcacatggacagtgcctttaaaggattttgggataaacagtggtgaaggtcacctggccgtgttattgagcgcagatgagttatctactgctcgtgaggagagagatcgattgtaccgttttgctgtccccggtcgtccggagctgaacaaaatgcatactgacattaacatgggaggcaacaacctgaacaatacggctaccgtgaatgcacaggctggtcatttcagtggcgatatccgggcgaatgccggccagtttcagggggatattcgtagccacgatggctgggttgtgacgacaaagaataaaggctggttaaatgaaacctatggtggtggttgggtgatgtcggacagcaactggcttcgcagtgtcaataataaaagcgtttatactgaggggcaaatcaaaagcggtaccctccgggctgatgggcgtttgtcgataggagagtttttacaacttgataaagtagcagtggcgggtacggcctgtttacccaatggattggttagccgcgacagcaaaggcgccatattgtcctgccagtctggtctgtggacaaaaggagaggccaccttgcagcagaatcaatgttatcgggatggaaactggggcggacgtgatttcgctgaacaccgatgtaagcctggatattatgcggcgggacttaaatttgtgggtcaccaacgcagcgaatcagcctatgtcatcacctgttgtaaatagctttaaaacgtaacgtgttaatatatttgatttttattttaggggttttgtgttgtccttgctttgcactagtgagcggattaacgccctggcggggatttatctgttcgggttttcgacacaggaaaaaacggtattacgtcattcatttgtccccgactgacagagtagggcgtctgacacggagccgaacccggtgttttcatgcggcatttgttcgcgaacttgagggggcacttttgcgggcagacagggatattctgtttcgttcgtaaacgtccggtcatctcaccttgttcttcctctccggcccatgcacgctaccgcttccttatcttcacctggagactgacaccatgagccgtagccgatataccccggaacaaaaacaacaccatgtgacccaatggcgccacagtgacctgacccgaaaacagtattgcgaacagcatcagctgagtttttccgctttccgcgactggattgccgacagtaacaacatcccccaacctctcagccagacactgcccgccctcttaccggtttcactccagcctgacgacgcgcgcaccgtcaccctgcataccccagacggctatgccatcgcctgtccattgacgctgttgcctgacgtgatgcgggtactgacccgatgctgaaaccgcaacagctctttctggtgcgagagcccgtcgacatgcgccggggcattgatgccctgacccagcacctggaggggctgaatttgcgctggcaggacgaagccgcttttattttctgcaacaaggcccgctcccgtctcaaggtgttgcgctgggaccgacacggcgtctggctgtgtacccgccgtctgcaccgggcccattttgtctggccgaagcagggcgagcgcagctgggtgatgacgcccgcccagtttgactggctcatccgcggcattcactggcaacaggtcgagggagatgacctgtccggctggcgaaactaattccgctaccccggtcacacttttaccggataacgacggggaattatccggtacactgtcggcatgacgctcaatgacttaatcgcgctggatgaccccggccagttccgcctgcgggcactggcgctgcttcagcaacaaggtgattatattcgccagctggaagaggccctgaaacaggcgcaacgctggcgttttggcgcgcacagcgaaaccctgcctgccggtcccaaacgcagtcagtttgaggaagatgccgataccgatatcgcggtgctggaaacccggctgtcacgcctgcatatcaaggaaaacgcgaccccggcccagcctaaacgtcagcctttgccggcgactttaccccgtgaagatatccggctggcgccggagacggagagctgcccggattgcggtcatgccctgcgctttttgcgtgatgaaatcagtgagcgactggaataccgtccggccacgtttatcgtccggcgctatatcagcccgcagtacagctgcgcgcgctgtcagtgtgtgcatgctaaagcccagcccgcccatcttattgaaaagggccttccagagccggggttgctggctcaggtggtggtcgctaaatatcgtgaccacctgccgctctaccgtcagcagcaaatctatgcccgcagcggtgtcaccctggcccgcagcaccctgtcggactgggtggggcaggtggcggtggcgttgcaaccgttagccgatgccctgaagcagacgctgctgacgtccccggtgctgcatgccgatgagaccccgttgccgatactggccccgggaaaaggccagacccagcgagcttacctgtggacgtctgtcaccggccccgatacctcgccggcagtggtatactatgagctgcatcccggccgcagcggccgttatgcccagagcctgctgaaagactggtcgggcggcacgttggtgacggatgactatgccggttacaacgcactgcatgcccgggcggatatcaccgaagcgggttgctgggctcacgcccgccgcaaattctttgaccaatacaaagcgagccaaagtccggtggcgaaacaggcgctggatggcattcgtgacctgtacaagctggagcgaaaaatcaaacaccggccgccggataaacggcgtcagtggcggcagcgttatgcccggccgtggctgaatgagttccggtcctggttgcaaacgatgcagacccaaacggcccccaactcggggttacgcaaagcgatagattacacgctgaagcgctggtcggcgctggtgtgttatctggatgacgggggggtgccgatagacaacaaccgggcggagaatgcggtccggggtgtggcgctcggccgaaagaactggctttttgcgggttcactggccgcggggcaacgggcggccatgataatgagcctgctggaaacggccaaagccaacggacatgagccctgggtctggttacgtgatgtcctcagccggctgcctgtctggccgaacaatcggttgaatgagctgttgccctggcctgagaatcccttccgttaacatcccattttgtggttatctgaccacgcaaggtgagttcaccggaacattactttcgttctcatttgatgcgtcctgctcagatacagctggcctgctcggttctggcgcattacccaacatggcgttaccgaatggttaacgtggtaatccctcgctgggaacgagcaggaattacattacaaaacttactgtatgaatggcgttatgtttcaacggctgcccgtggtgttatggtggtggtgaagcaggaaaaataacatcttatattaggggataatttttattttttcatattgagttttttatcgtcatcctttctggttttgtacagtattctcctctgtatcgggtaatcatatgattagactctaatcactactgaataagtcgcatttctgtgtccgttgttttgtcaagtaattcgataatactaaaagtatgccaggcacagtgctaaataaacaaggatgttgtggtatgacaattgaagtacctcctctgtcgccgacgtctgaggctgaaattgacagcttgcggcaggcggtttctcaaaagacccaacccagattgttgtcgttaaaaaaatgtctgaggtatctgtcaatattgcttgttattgtcagcatagcgttgctggcattcgtggtacggcagcaacatcatcaagttagtggaatttcagtcattgatgcgaaatggatcattccagcatttgccggatgaggtgcaaaatctgcacgaacggcttgataaagcggataccggctttgtctcccgtcaggactggcaaatgtaaaaataaggctgatgtgggttgaaaaccgtcgttaatcacaggcttgacggttataattatctggcagaattaagctattaatgcgatatgagagaattgaaatcctgttgctgcaacgacgttacgcaaagttttcaaagtcggattgcctttaggcgacagcgttcggtacagagtctcgcgtgaaacacctgccttatctgcaatctgtgccattcctcctcgtgcttctacaacatggcgtaatgccataagaaatgcttcctgcccgccttcttcatccatatcaacaaatgcctgatgcagataatgctgagcaaactcaggatcttcacggagaagctgcaccattgcatcatcatgtaaacgtgctttggccataattacctcttcaaatagtccttcagacattcaatcgcctgatctatatcggcatcttgggttcgtttatcgcccccaactaacaataacaccacttcacgaccaactaagctgtaatacactctgtagccaggcccctgatctatgcgaagctcccagacaccctctcgacaaggtttattatcaccaaaatttccggtagccattcggttaacccgtgacgagattttcgatttcgctatagggtcacgaatacctttcaggaactccatatacaagtcccggttatcggaggtgagataatgtttgatcgtgttcatataaattattgtatctttaaagctacgaatctgtcaatgtagcatctttcggtacgaataatggggttatcgggttactcatatgcctacaggcactgcatttgaatttgatgcttggggtaactcaattttgcatgttgaaggtgatagccatcactcgacaaccggagatatggaaaatcactccaacggtaatatcataaatgacgcaggcaataatttaactgaaacagttgagagcgtaaaaaaccgtggggcaatcatttaaatgctcctctcggacggcagttctgaatggcgagctaaaggcacaatttgaacgttggtatcccagcatcaaaattaatgagctagtcggaatatggttgatggttttacattagctatagcggcataaacgccaatgtagtaccccacagattttatgctctatattggagtgtaattttcattttttcatgttgaattttttatcgtcatcctctctggttttgcacagtatgcttccctgtgtcgggtaatcatatgattagactctaatcactactgaataagttgcattcctgtgtccattgttttttgaggcaacccgataatactgaaaagtacgccagacacagtgccaaatgaaataaacaaggatactgtggtatgacaactgaaataccttctctgtcgccgtcgctgacgtctgaagctgaaattgacagcttgcggcaggcggtttctcaaaagacccaacccagattgttgtcgttaaaaaaatgtctgaggtatctgtcaatattgcttgttattgtcagcatagtgttgctggcattcgtggtacggcagcaacatcatcagttagtggaatttcagtcattgatgcgaaatggatcattccagcatttgcctgatgaggtgcaaaagttgcacgaacggcttgataaggcagataccggctttgtctcccgtcaggactggcaaatgcaaaatgaccggtttcatcaggcattgatagcgcaacagggagccattaacgaccaacaaaaacagctcgcacagtcagttactgatttaagccgtgctcatcaggatcttaccgaagcagtaagtgtattgaaaaatatcgggaaacagcaggaaatacgcgttgacgcattaatcgcgtggaaatctcagcaggaaaagcatgcgggtaaaaaagcgggcacacctgatcgggaagttcttcgaacgaagaaacggatagtggctcctttcatactttctggtattgaacgtcggggagaacaagtttatgccgttattattccacgagacacagatcctcgttcccaaatatctcagatgcgtttactgactccgggtgaaagcgcatttgagtggacgttggtcagtatctccgatcatcaggctgtgttccaggcacaagggcaccgtcaaaccctgtcagtcaatggagggtaatgatgagaaaagattttttcagccagaggaagggagtggtgctgattggcgttgttatgtctctgtcagcttcggcggcacaggttgctatctctgaacagacagagacgggaatgaaagcgactcagcaacaggtcacgcaggctgaaaaccaccgtattcaggcgcaaatgtggggactgacagaagcagagtttcagcgttatcagcaattgatgcaggggcaacggggcattcagtctcctgggctcgatccgttgagtgcattgggtattgaggccgaaacagtacaagcgcgtcaacgttatgccgaactgtgggttaggcaggaatatgttcgtactgaaaaggaactggcgttccagcgggcggtggatgcggcctggaagcgtctggcgccgaatattttgccggttaatttagggaagggggacggaatcgcacagggtaatcaagggcggctggtgttatttgtgaaagaggattgcgcggcttgtgatgcccggctggctgctgtcttgtcagctgaccgtgaggtggatatttacctggtagatagcgaaggcaacgatgatgttttacgtacctgggcaggtaaacatcatattccctcagaaaaagtccgtagccgaaaaatcacgcttaatcatgacaaagggcgctggcgacaatttggtcaggggaaaatgccggtcgtactacaacatgagaatgacggatggcgtgtggtggcattttgagtctcgctgtggcgggaagtctcttttgggtgacagaaggtatggccgcggcggtaaaacaggttgttccgcctgggtaccagcagattgcgcgggtgcatggcgtacccgttgaaatgctttatgcgttggcactggctgaatcggcaaaacgtttgccacaggagaaacatgaacgcccctggccgtggacgctcaatgtggctggaaaaagttatcgttatgcaacccgacaggcggtctggcaggcgttgcagggatttatgcgcagcgtacccctcaaacgtattgatgtggggattactcaagtgaatttaggctggaacggccattattttcgttcttattgggatgccttggacccctatactaatcttcatgtggcagctcgtattctgaaaacctgttatcaatccaatccgggtagttggttgaatgcggcaggctgttatcaccatcccgctggcggtcaacccgcgagtaagtatcggaaaatcgtcgcacgtaaactgagtacgctagagacccgatatcctgttttgtccaccaatattgctgtagttaatacgacacagacctggattgaaccgaaggaaaaataaagaagatgttaatccataacttaatccgttatcgctgccgtttatttttaatgatgatgatattgacgccctgttctcaggctgcactgactattgtggctgatttaggtggacaatctacagcagcgtattttgatgccattaacgctcaggacaatgaaccgacgacttcttcaaatacggaggcgaccccgccagatttgaccgaagggggcattttaccggtggaaacgccggaattgtctcccggacctgttgacgctcgtccgttgcaattgccaggaatgggagcgttgttcatgattggggatgatgcccggtcaaaacagtggttgaaggaaaatttggttggccttcggaaaaagcaggcggtggggttgctggtcagtgtgcgggataaagcacaactggatgaactgcgtcagcttgcagagggattagtattagcccccgcttccggcagtgatttggcccggcggttgaatttgcggcattacccagtgttgataaccgatatcggtttaactcagcaggtgcgttgatgtggccccgtcaccctatactatccgaactgatgttgccatacagtttcccggtgcttttgttgggattgttgttggcaattgtggtgttatggcgggctagatgagcgatcgttatgtgattgaagcacggttacgtccggctgttgagttgaataccgctgttgtttcggcggttgccgccggtgtctgtatcgtagcgccgtgggctgtggcattgtcaccatcggtcagtgatgtcatggcggcaggttttggcatgttatcaggtctccgattccggcaggggttacatatactgaactaccggcgcaatatccggcgattgccccgttatgtgatggccagccaccaggtacccgtcagtcatcagagattgtttctggggaaagggtttctttggcaacaaaaacatacacaacgatttctggataccctgcgcccggaagtcgaacgttatgttcaaccttcccggtattatcaattagcgagggcatttgagcagcggtttgagtacccattgccctctttatgtcgtctgacgcaacgtgattctccgtggaacccggtgaggccactgccgccagtaggaggcaatccagcattgcatggcattgaaccagatgaagtcaatgtgtcaatggatttgcgtgagcgggtcgggcacatgttggtcctcggtacaacccgtgttggtaagacccggctggcagagttactcatcacgcaggatatccggcggggtaatatcacgattgtgtttgatccgaaaggggatgcagacctgctcaaacgcatgtgggcggaagcgcatcgtgtcgggcgggaagatgagttccatgtgtttcatctgggctggccggatattagtgctcgctacaatgctgttgggcgttttggtcgggtttcagaagtcgcttctcgtatagcaggacaattgagtggggcgggtaacagtgccgcttttcgtgagtttgcctggcgttttgtcaatatcgttactcgtgctttggtggctctggggcagcgaccagattacaccctgatattacgttatgtcaccaatattggcgaactgtatgaaacttatgctgaaaaaattatcaggcaatgcctgcctgtgttatgggagcaggtagagaaaagtctgggtctgctgacggaagacgatttgccacgcaatatgcaggggcagacgaatgcagtgaaaatctgggcgattgaaatggcactaagctcagaagcggggaaaaaactctacgatccgatactggacgggttgcgcagtgcggttcgttatgatcgcacctattttgacaaaattgtggcgtccctgttgccattattggaaaagctgaccacggggaaaatagctgctctgttggctccagattacacggatatgaatgatccgcgtcccatctttgactggcaacaggtcatacgtaagaaaggtattgtctatgtaggactggatgctttgtcggatgcagaagtcgcttcggcagtgggtaattccatgttcgcggacttagtttctgttgcgggtcacatttacaaatttggtctggatgacggtttaccagaaggtaaaacgagaaaactccccattagcttacattgtgatgaattcaatgagctgatgggcgatgaatttatcccgctgattaacaagggtggtggtgccgggatagaggtaaccgcttacacccagactttgtctgatattgaagcacgtattggcagcagtgctaaagcggcgcaggtaacaggaaattttaatactctggttatgctgcgggtcagggaaaataacaccgccgagctgctaacccgtcaattgccagaggtggaagtgtacactaaaactttggtctccgggattaccgatatttccagtccagagcagggcggtcattttacctctaatactcaggatcgggttagcacgatcagaacgccgttaattacgcctgccgaagtgattaacttgccgaaaggtcaggcatttgctctgcttgaaggctgtctcttgatcagatctccaaatcaactgatttagccagcaaatagccgtctatcagggtttgcagccgaaaccagccttcccaaagtcgttcccatccgactcgacccgtgcgtttggaatcgtaccagccggccagttttcccagattgatgaaggcccaatgcaaactcggggcttttttcggcacacggcgtttttcttgttttgaccacagtaatttccacgccagggggcttaatactgtctcacagctctctttctctgcctcttctttgttcagacccataaaacgcagctggtgtattcgtaccgcaataaaggccagcagcactatcatgcgctccagattatctttgctttgcatacgcagcgcttctacctgcgtgccgcccgttttccacgctttgtgaaattcttctatcagccagcggcgctcgtaataactgaatattttatgggcgtcttcctgactgttgacgggttcggaggtcagaagatgccagcaaagcccatcctccggacctttttcgtagcaaccgacataaaatatccgcaccgcctcaccgctttttccttcggggattttcaacgtcacttcggcataactgatatcacaatgcgcgacacgcgcctgacgcccgcctttctgtctgacctgaactaatcgttctccagcactctgtaaccggctaataaagtcataaagtttatcctgactttcctctatacgccggttttgcatcgaacggatgacgaaacgttgtttttggctcgttttataacgcagatattcgatgatatcggcttcacggtcacagacagaaatcacgttggccatctgctcccctaaccggctgtcgacggcttgtgaggcccgttcccacttataactctctttcccttcataagggcgtgtatcgcgttgtcggcttttgccataatcactgacatctcgacaccagcgctgttgctctatcaaccccacgacctgttgttcttcaggcgcaaataacaacaccgagtgtgcctgcatgccccgggatttttcctttgaggtggtatagccgagttcatcggcgaccgacgcatgggaaaatgacagggttgtcgtgtcttccagcgctaacaggcaatgataacgttgagcgtgagcgacggtggcggtaaatccggcttcggcgatggcctgaggcgcaatggcggaatttcgggtcagtcggtaggccgcttcaacatcggcaggagagtcaagagattgcacgagcgattgtcctatatggttagccaacgaacaggccactttcaccaggcggttggtacggcgtttatcacctaattccgcatgttgaaacgtgtcatttgcccattgttcggcgctggttgaaaacataaagattacctcaagtcgtgttttttattgagatcaatctatgagggaaaagttcaataacgcgggggcgggttaaaatatttgtgtaggaaagacaggcttgaaggggggcggttatggaagatccgcatgccgttgccagcagccgatgatgatgacctgatgccgataagtctgcaaaaaatcgctgatgatatgcgtaaacattaccgtaccagtgaatcctggtggtctgcgggatcaatgccaagtgacagtcagattgatttcaatgtgatgttaaatccagcgttgctgacgcctgatggggaagctgacgatgacgcaacagaacactaaatcgcagcagatgccagcgaaaaaatcaggtccgttaaaaacggtcctgtgggatatgccatggatgcttattggcttcctgctggtatcgttgttttttagtttggtgattgaataccttgggatagcctttttctggccggaacagggagagagacacagccagcaagtgatgatcacggaaagcggttggttgtctaaagaatttacccgcagcttactgttatcagagcccgctactacgctcagtatcgggttaaaatggagttatcagtgggtgtttgtagacagtggtgcactggactggattaaccaacagcatacagtacaagctcggagccactatgagatggtgagagagttgagcgattggagtgtattactggcggaaagtttgcggaagtacttgctggcaacggtatatgtgaccgtaacctttattatccggctcactattctggtgttgtctttgccattgtttgtgatggttataggcgttgctgtcgttgaaggactaaaccgacgtgacctgcggcgttatggtgccgcttatgagtcgagttttgtttatcatcatgccaaacggtttgtgaaaccggcgttttgtgtaccctgtctgttatatctctcctggccatcggctgtgtatcccaatttattattgttacccgcagctatcctattaggggtcgctattaccgtgatgatgagtacttttaagaaatatctttgagataaaagcagtatgatgtggattggttggtaaaacgtctcaagtacctctttaataatagtaagaatgattttatgcttttatgtcgctgagagagatggcctccaatatgaggccaacggttataacatttccttagcagtacattggttactcttcataatgacacggaagatggatacagtaaccaaattgaggggaaatccctttcatttgctaggggtgttttcatcattatggctgagttctgcttccaattcctcaatgcttggcaagctggattttaagtcctctggcaatgtacgggttaactcataatccgaaacgccaattggtttttgaataccgcgcaaggcatattcggccagtatccggtctttggtctggcacaaaatcaaacctatggtgggctgatcagtggaatgccgtagcttttcatcgaccacagagcaatagaaattcatcttaccggcatgttcaggcttgaactctcctcgtttcagctcgatcacaacgaaagccctcaaagtcagatgataaaaaagcaggtcaaggtaataatcttgttcgcttacggtaattcgatattgtcgccccacaaaagcaaatccctcgccgagttcaagtaggaatttttcaaggtgtttgagaagctccgtttccagctcacgttctttgaagggttccgatagggtgaggaaatcgaaaacatagggatccttcagggtctgctgtaccagctccgattgagatacgggtaaccggttcttgaagttgctgacaaccgagccctgccgggcataggcattgcttttgatcatatgaagcagggagtctcggctccatccctgtatctgagtctgttctgcataccagaatcgctcggtttgatcctttatcctctcgatcagcagaatgttgtgaccccacggcaattgtgccacaggctgtggcacaattgtcgacacgggctttccggaaccttgttgctccattcgtggcaaggcgtactcccggtagaaacgtaacatgcgcttcaggttcctttctgagaagcctttgacctctggcaattcattaacaatatcccgtgccagcttcgggatgatccccgctccccacccctgttgctcctgacgctcatggagcatgtgaccgatgtcccagtacatctggattagttcagcattgacggactgagcggctctgaactgacccccacggatccgttcctttacatcggtgagtaacgaagtgtaaatctgtagttctgatgtcatgattatcttgtttctttcagtatcttgtagacggtgaagcggttaatatccagttgcctggcaatctcagaagccccaaatccctcatctttcattatcaaaacctgttgtcggtttatagacggaacctgacgcccttggcttcgattcgcccttcgttggtttgttccagtctccgttgccgttcggtctgagccactgttgaccggatagtgctcctgtcgtccaagaaccagacggttacattcatctcaagcaggtaatagttgtgttcagtagtgatatgagaaaatatcaattatcaacccgcttattttaagtgagccaggatgtttatagctctgtttcaaccttaaattcaagtatccaaaatttttaaaatcagataaacaattattcactgtaatcgttaccctttttcgtcactctgttgatgtatatatctacgcagatttagggtaatgctatggtttatttccgtttattttcccatagtctttttgtcctgacgatactaatgagttggcctgtgctggctggggaaaaagatgagctggccaccacactcaaacagcttgatcaggtgcaggccagtttggaacgtgcccgggttttggccattcaggagggtcaggcagaccgtttttattttgattatctacgtgctaaccgggacctcaatattgtccgtgaaggcattaaccgctatctgaccccctcccgtgcccagcccgggatttctgcggctgcgctggatgtgaccggtcagtatcgtcaggagcgaatacggtgaacgaggttcaacgcaatgcattcagggcggcttccggcaatctcgatcctcatgtgatgcaatttctctgtatcggtttactgatagcggtgctatttctctgggccgcatggggaatggtagacgtctggcagggctgggccaatgaaaaggtccgtgaagcggcgatgaaccgttttgtcattcgtgtggcgttgttgctggtgatggctatctggatgtttgccagctaatcggttttttaacctgtaatggaaaaaagggaaaaggaaatggatctgttaaaccggggatgtcagtcactgttccgcctgtttgcccgtatcaatacctgtgcagtgtcactcagtgtgctggcttatctggtttgtcaacccgtgacagcggcattgccaacggttgaaccgccttccagcgggagtggcggtggtatttttaataccgtcaaaggttacttgcaggacggcatcgtgataggcgggctggtcgttgccgcgatcgcgtttatcaatgtggcgaccgcggcaatccatactttttctgaagttcgcagtgacagagcctcctggactaaatttggcgcgattgtggtggttggcgtggtgctgttagtggcggttatctggctgctgggaaaatcgacgtccattctcttttaaccccaggaaagcgtcagtatggttcagactattcgttttttacctgaccgtcttaacgccgaacctgtcgtgttccggggatttactaccccagaactgggctggacggcattaacgggattgatagctggcgcggtcattggcttgttactggcatcggtaacggggtgggtgatgataccgacggcggcactgattgcgccgttgttattgattgcctttggcggcaaatacctggcccggatgaaacgcggtaaaccggcgcattatctctatcgacggctggaggttaaaaagcggtgctggggtctgggtgacccgttactgattatcacctcacaacgctggtcattgcgccgccgtcaccgggtaatgacccgaatggggcggttatgagccgttttcgtcatgcaattcaagatcgggaccagcatatcctgacgttacgtgcggcctgtggtgtgctggttttgttgttgttactgagtctgagtggctggctgatggcaccgagagcgttaaccatttatacgccgccggatgtccgcagtggcagtacccgcccgtggtggcaagtgcctgtctcccaggtctatgcctttggcttttatatttttcagcaactgaatgcctggccgaaagacggggaagtcgattatccagcgaaaatagcggcgctttctccttatctgaccccctcctgtcaggtatttctggaacaggatgctcaaaaccggtcgcaagtgggtgagctaaaagatcgcgtgcgggtggtgtatgaaattccggaacggggctttcgtgacagcaatgtgatggtaaaagaccgggataactgggttattcggttagatttagtggccgatgaatattttcacgctgagccggtcaaacgggcactggtacgttacccgcttaaagtcacccgttgggaaggggatgcagagcgtaacccgtttggcctggcactggattgttatgacagcacaccgcaacggctggaagcagcatcgcagccggcaccggcgaaaaaggggatattccagtgaacaaacaggtactcgtcgagttattggcattgaccgcattattattcgccgggctggtgatggtttcacccgttgaggccgtggagttgatgaagtgggagcgtatcccgctgccggttgccttgcatgttgggcaggagcgggtggtttttgtagataaaaatgtccgagtcggttttccgggtgcgctggatggcaaattgcggatacaaagcaccggtggtgcagtgtatctgtatccgagtgaaacgtttacccagacccgactgcaacttcaggatgtggaaagtggggaagtgattttactggatgtgacagctacaaatggaaaagatccccttgagccggttcgggtggtgtaccacggggacgtgattacgttgacggatgaccatcagattcatcatggtgccaaaggggataacacgtcagcaacgtctccctctcttgccggtgaacgtcaggccgcccggcgtcaaaaaccgtcctatacggctccgctgccggtggtcctgacccgttatgctgcgcagagtctgtatgcgccgttgcgtacagtagaagctgttcccggcattcacccggtatcattggcattgtcgccccgattgaccacattgtatccctctgcgccggtaatagtttccccgttagggggctggggggtggataacctcactgtggtggcgctgaaagtgcgtaatacccaccgtgagaacgtagtgcttgatccacgcaggttgcaggggcaattcatagcagcgacctttcagcatcgttggttggggccgtcgggtacgccggaagacacgactaccgtctatttggtggtgaaaggtcggcctgaccgtgcctttctgcctgaaccggtgaggtcaaaaacgcctatgaagcgacaaggaaatccccatgcaaattaagtcaaatggtctggtgaagtgggtcgtgcctgcttttgttattgcggggctggtcgtggggatcaagagttgtcggcaatcagagacgcctgtcagccagacagtgagtcatcaggctttggcggaactgtcttccggggagctgcgggcattggggattgagggggataccccggaagacacgttgcgcaccttgattggagctttgcgcagtatccgtgttcagcaggcggcgctggaaaaacaaaacgcacaattactggcggacaatgagaaatggcgaaacggcagtcagagcatgactgaccagattaaccgggtggtagcgggtacccgtgaggaaacagaaaagcaacagcagctattgaaagcggagcagcaaacgctgttcagccgacttgaccagttgacccgtcagttaggcaataagggcatgaatataaacaactctctggttgagcgtgatattccgctgggattagggttggacaataccggccaaaatacgacctctggcggggaccggttggtctggattaccccacaggatacgttaccggttgattcacaggttgcaatgagcggtcagccagcgtccccccgttttcccgtgtcatttctggaggacaatgcattgagccgtcagaaagtggaatatgacggtataactaaaaatcagcgagccattaccgaggatcatacaaacgagattatccggcccgtttataccctgcccgagaatacgacgctggtcggcagccaggcgatgactgcattattaggccgggtgccagtaaatgacaaagtcactgacccgtatccttttaaggtactgattggtaaagataacctgactgccaacggcattgaattgccggatgtcgaaggggcgattgtttctggtatggctaccggtgactggaccttgtcttgcgtgcgcggcaatgtcacatctttaacttttgtctttgcagacggtaccgtcagaactgtgccgaaatcggataatcgcaccaatggcagccatcacgttcaggataatagcagcggtggtatcggctggctatctgacaacaacggtattccgtgtatcagcggtgaacgtaaatccaatgcatccagttatttaccaaccttatttgctctttctggtggcacagctgcgggcgatgtgttgtcacagagtcagcttaccacccagactaacggttatggcggtgcgacgtcatcactgaccggggatgccggtaaagcggttttggggcaagccgctgccggaggatttaaggccgtatccgaatgggtcaaagctcgttatggccaaacttttgatgccgtttacgtaccgccgggtgccagagtagccgtgcacattacccagcaaataccgattgattatgaagagcggggacgcagggtgaaatataacttaggtcttggacaggaggtccgtgatggtctggactgagaaaacgagcatgaataaagcgcgaaaaatagtgatgttggtggtgataacgatcctgaccggttgcagcacgtctaaagaagagatgcttccgccgggagacagcacaatgctagctctgtggcagggaaaagcctcgtcgtcacagactacaatgaaggtccgtaaaacactgcgccgggagctgagcgaacgggaacagcaggctactctgaattacactgaaagttatagccgtacacaggaaaatgaaatcagtcagactttccctcggttgcccaatccagacatggtgatgtacctctttcctcatttagttgcgggaaacacgccagtaccgggatacagcacggtgttttcgttctacaaccaggtgcaatatgctttgctgggtgaacggacggaggcattgtgatgtggtcgctgttgaataaagtccgcttgcgtaaatgggataatctatcggaagttttgggtgaaactgaggtcatactaccgtcgtcttctaccgttgttgggcgtgaacctttgaggcgtcccggcaaaatgaccagcacggatgaagctgcgttgtatgacacttggccgtctatcattgattacctgccttgggtcgaatatttggacgatgagaagtgtttgttgctggatgatggtctttcagtcggcgctatttatgctgtttccccggtatcgacagaaggacgcactactgcccgtctggaagatattcgtgaccaggtagaagatgcgttgcaagacagtctggaagacgatgacgtatctccctgggtagtgcagtttttttgtcaggatgaggatgatcccgcgttatatctgacacaacttcgtcagtatattaaaccttgggcgcagggttcagccttcactgaagcttggttggctgaaaccgaacgtcatctgaaggggatagcccgaccagaagggctgtttaacgattcattggtgactggtcagtcctggcggggacagcaacgtcgtacccggatggtcatttatcgttgggcccctgtcggacagaaagaaagcttgctacccattgtgttgcttaatcaggtgtgtgaccgactgacagcttcgctggctagtacaggtattttgtgccaacgacaaaatggtgaacaggttcatcactggttactgcgattattcaatcctgatccagattggatagacaaagcgacgttgtatcaggcagctagttatgctaccccacaggctggtgagaggaagccagataatgatttcacggaaaccttgtggtttaccccgccacgttctgacgtgaaaaacggtgtatggtggtttgataatattgctcaccgagcggtaccggttgaacggctgcgtcgtccaccagagccgggaacgctgaccggtgaaatggtcagaggggagaatatcaatgcactgatggacttattaccctcaggaactattgtttcgctgactgtggtcgcacaagcacaagacacgctagaacaggatttcgaccggttgtcaaaaaatgccgtgggagaaaatactgaatcagggagagtacgttcagacgtaaaagaagctaaggcacatctggggctgagacataaactgtgccgttctgcactgacctttctgttacagggggctgatgttgacgatttgaaccgtcggcatcagcaactggccgcaaccctgttggtatcggggttgcagccggtcaaacccgaatgcgacgtcgcgccgttaaacggttatctgcgtgccttaccgatgtgttttaacccgcaacgagacaaacatcactggtatacccggttgacttggatgcagcatgtggctgggttgttgccggtgacagggcgggcgaccggcacaggcaacccgggtcttagcttttttaaccggggcggtgatgtgctgacatttgatccgcaaaataaacatgaccgtacccagaatgcgcatctgttgctgttcgggccgaccggtgcggggaagtcggctacgctctgtgcgagtttatcgcagttgatggcggtgcactgtccccgattatttgtggcggaagcgggcaacagttttgggctgtttgccgattactgtcaacgcctggggctgagtgtcaacaaaatcagcattaaaccaggttgtggtgtcagtctggcgctgtttgccgatgcccaccaattgcttcaagtggcatcttctcagttggatttggcgggtgaaaggtcggcagaggaaaccgcagatgacgaggccgatgagcagcgcgatatcctgggagaaatagaacttgcggcgcgcatgatgatcaccggtggggagaagaaagaggaagaacgtctgacgcgggcggatcggggcatgatacgtgaagccatcatgatagcggcgagagccagctttgatgacggccgacagatgattgcggaagatttgcaaaatgcattgtctgtgattgcccgggacagccggcgggatgaacaggggagagcattgtgtaccgaacagcgtcgggcccgtgctgaagagatggcgggggcgatgtcaatgttcaccagtggttttgagggggaattgtttaatcgtccgggaacaccttggccagaagccgatgtaacgctaattgatctcggtacgctggcgcgtgaaggatatagtgcgcagatggccttggcgatggtgtctctggtcaataccatcaacaatatggcggaacgtgatcaatttgatgtaagggaaattaattttgttgtggatgaggcgcatgttctgaccactaatccgttattgtcaccttatatgaccaaagtggtcaagatgtggcgaaaattaggggcctggttgtggctggctactcagaatttggcggactatccggatacggctgagaaaatgctcaatatggcggagtggtggttgtgtttgacaatgccgccggatgaagtcgaacagatagcgcgttttaaaaagctgtctgaagaacaaaaatcggtgttgctatcagccagcaaactcccgggttgttacaccgaaggcgtggtgttgtcgaaaaaagtggaggcgttatttcgggtggtgccgcccagtgtgtatctggcgctgggcatgacggagaaagaggaaaaggcagagcgcagggcgattatgaaaacgcttcattgcagcgaattagatgctgcctttgttgtggcgcgaaggctggaccgtgcccgtggtctgatatctggggaagtggcggatgggcgtgatgaggatctcttatccatgcaggagtgcaggctatgaatatcagggtattctgggcgcttttcccgttgttaataccggtatccgtgtttgccagcacagtgatatataccgacacaagccatccaccgctcaatgctgatcaaaacgtgcaagttgtgtacctagataagccagagcagttgcaatcacagttattcagtaagctgtctgctgatcctcaacaggcagtcaaacaggcccgtcagattttgcagtctccatcgtggcatcaacaggagcgatatatcagtcaggcttatcaggggttactgaatgcttggactctgggccttaagaagttcccggcagtggtttttgatgatgattatgttgtgtatggtacgacagacgttagacaggcccggttactttgggatacctatcagcaggaaaaccagccatgaagtctctagatttaccgtcattaacatggcattcccggctgaaaaagttcggtatggtcctgatactaacggttgttttggcgccagtggccgttgctagtgtgaatacggctcagattgtgtccagtgccgcgtcggtatcgtgcatcagttggcggataaaaggtctctgttactggctgctgtgttctccctgggggtgtaaagtgcgtacctcgataaaagttgcgcattttattcctcaggccgtggtctccgtctataacgcgcctggcggtaatccctggagagaaatgtctctggtcagccagactgttgacggcgtggaaaatgccgtaacgagagcactttccgggatagccgtggggggcggtaatcatcagctgaaaatcccaggcaaccgaaaaaacaatctgcattttaaatatgccgatgcgattgggcatccggcaactgccatgatgggcggaaaaatttcggggtatgcgtgtaaaagtgccgccacgccttttatgccttactttttgagtacgctggacagcctggtttggcggaccggtgtgccagagtcgttttatcccgaagcgcttattccaggcaaacgtgaactgggtaattcgtttcggggcaatatgtggggcaatgtttatccgcgaagcgggtttgtgacacaacaggatgataataaagcggctgcggtggtagcgcaacgggtagcagacattatcacccgtactggacaggggcatgtttatcaatccttgcaagggaaccacaaacagggttactggccaccgggcgaagtcgttgagaatacggttaaccaaaatcatcaatggcaacgtatagcgccgaaaatgagcacctcttgtgctgtttttccggataacagcggggaagcggccaaggacgggaattatgtctttgcattgtggcaaccctacagttgttgtcagcggcgtggacagacttttctttacagtaccgatttttgagactgggatcatgggatgagacaacgattatttttgcctgtattgatagcactggcgtttatgactgttcctgttgttcgggcggcaggttttgccattgcggacagcccgataggttacgggaaaagcctgaatggggcggtatcggataagttgttttacaacataggtggcggatcagtgatatcgcagccggcgacccgcagtcatctgcaacatctgggcggattaaacctcggttggagcagtgacctgatgtgcggtaactttgatttgaaaacgacggtagggaatcagcttaatggcctgacttcggggtttaaaaacctgatgggggaagtgatacaaggggctactggggccgtagctagtttacccgcaatggttatccagcgtgctaatccgggattatatgaaatgctgaccaacggggtgttacaggcaggtattgcgttcgacaaatcacaactgagttgccagaacatgtcacagcgtatgatggatttctcggatagcagtaaatggactaaagcggcgttgatggaggaatataaaacgttggtgaataccggtaatggtgatgcggttggcacgacacaaaaaatggaggttgcggacggtacacaaggttcaaattggattgggggtgaaaaacggggaggaaaagggcagaaagcgattcagcccatccgggatctggcaaaagccggcttcaatatgatgaacaacctgccggcgaatagccatgccaatgtcaaccgcacacaatgtaatggcgctgcttgccagaaattcaagaacagtgaagaagccgcagacgcggtcgtcaaggtgttaggtgatcgttcggttcgtacctgtactgacagtcgtcagtgtaccagtggggataccaaagaccagccgggtgcaagtgtcgctgggacggggtttgcaccgatgctggaagaggctaccaggaccaacattgagcaattgatgaaactggtcagcggggaaaatgcgcctaccatagtcaatctggcaaaactcaaaacaggtagcttgatggtgactcgcggggttatccaggctctgaaacgtgatccggacagtggggctttggtgagtcggttggccagtgagttggcgatggccgacaccgttgagactgcgctcactatgcgacgaatgttgatgaccggccaggcagaaccgaatgccgccgctcaggcgcaggcgatggcagagagtgatcgtcgcattgcgacactggacagagaaattactgccctgaagaatgaaatggagttgcgccgggcgattgcacaaaataccgccctgaccacgcttgagcgcgaacaaaatcgagttgaaatgaatctgcaacggcaatccaccgataataccgacagtcgtattcacaccttgtccgtgccgccgaaagggcgtgaagggcaataatgatgtctgagcaaagtaaaatccgggtacctactggcactaaacagaggttgataatgggactgaaacggcatttcaggcgggggttaatcgtcacgttgatgatggggggcatgttacttgttgccgcagttggcttggcgtatccgtctcagttcaatgccttacaacattggatgtacacgacccgttacggctggctggcttggcgattggccatgtacagtgttattgcctgtttcatgtggcagctttggcgatccccattgccgttaacacagaaagcggctctgaaacggattgcactcatttcgctgggatttgtggggttttgtgagtatgccatgttcttcgtctccggagatcagtcatgacaacttacagctatctggaatattttctgaccctgctgggctggatagtgaataacggcttgtggaatgtgctgctggccaccgggttatttgtgctgccgttgacattcaaaatgataggtatctggctgaaagtccgggaagaaggggaggatgaagggaataagggcatgctctcagtaacccggattgaaaacactttgtatggcgcttttctggtcatgattgcttgctgtgtgccgttggtcaatgtgagtctgagtaccattacgtatgatgactcgcgggcaaaaagttgtggtacttggacaccgaaaccggctgaaacgggttatgcgtccgtgatatcgtcgcttgacggtaaaacggcggcggctccggtttggtggatactggttcatcagatttccaaaggggtcactcaggctgcaatagcttctcttccctgcagtcccgacttgaggcaactgcgttttgaggtccagcatacgcggattaataatccggcactggctcagatattacaggatttcacccatggctgttatgcgctggcattgtatcagtggaaacgccgggacgagggaagaaccctggatgaagtggtattacgggatattgaatggttagggtcaaaaacgtttctgaatagtgcgggttattatgatgtacttcagtcaaaaacgcctcgttcggattttccctggaaaccgcaccgtgatgatggttttgctaatacgggacaggggggatatccgacctgcaaagaatggtggtcagacagtcaagtaggattggaaaaacggatcatggcgcaggttgaaccaagcatgtggtttcggctatctgcggcattgaaactgatgggcaaagagacgtcagaatacaaagaagcggtgatacggcgtctggtgagcccggaaagcttgaccgcatctcaagggggacatgtctatgccggttacggcggtaacgcggattttaccctgatgaattcggtgggccggatagcctcattgggcggggtgtcgttggggagtctggcggcatttccggcgtttgatgcaatgcgccaggcattaccaatggtacaggctgttatactgatggcggtgactatcatattgcccctgattatcgtatttgctgtctacgaatataaaacggtcgttacgctgacttttattgtgtttgcgctgaattttttgaccttctggtgggaattggcacgctggttggacagctggttactggaggcattgtatggttcggatacgcacagccgctggaatatggctggttttcagaatagcacagacgatatcattatgagttttgtgatgggagcgatgtttattgtgctgccggcattgtggatgggagcgttgtcgtgggcgggtatcagagttggtggtgcattagaaaacacagcgttgcgacatgggacttctgaagctcaatctagtggtgccagaatgggagagtcggtgtcaaacaaaatcatgaaatagtttatatgattatattaaacagtggcatagataatttatttcactgtttttaatcatctagtttgctgccgttggagtaaaaaccataaccttctgaaccatttcgatacttagcttttagagattcactgtaggtagtatcttgcttgttatctttagctagtgaaaatcccagtagtagtccaaagatcagcacaataactcctattgccattagtactcctgccagcaaagtgactactatactgctaacaagtaaataaatgggcatatgtcccatccagctagggagattgtatttgtgggctttggcaacacaatgttcatcccaagtacgtaaacgctggcgtaaattacgataaatcctggcagcttttgctccccgaatctgagcgcgcattgtacgttgtatgtcattatggttagtcattgggtagtctcttgttgaaacaatgttcagataaataatatgattattttctggttaggttagctaaaagtctgagcggcgtctatggtgtgaattgtaaaacgagttgtgtgttatgcacatttgcacggctgatagagctcattcacctgaccccacaaagggtcgggtgaatgaaagcggttggtgagctggggaggcgaaccaatatcagcggtgtaactgtgtataacgcttattaaacgaaaagttagtagttgtatttttaacctgtcgatatttttagtttgctattcagcttcatgtttattatgagcttttgttaatacgtatagattgctgtaagataacaatattcatttcttcgtctacctataataagctaatgccaacttttcatcagacaggatttattgaggctactgttggagaaatccagtatcaccggtttgatttttctgtagaagatcatgattttgtgatgattttttccgctgttgaaatatctgatgttgaatacctccagatgcgctcggaagaggtcggtttttccatccctgagcgttgctatgatgttaagtttgaccgtctagagaattttgacagtggtgatttctacgcacctccaccaccagatgctattttcagtaagcttgggtatcagggcttgatgaggttgggtaaagcatttagcgagattatcggtctgcactatcaattttatgatgctaaggcatattttgctatggcggaaacgcgaaagcttaagagtttttatgaccgaattttacagcagcctaatgttggtgtaccatatgaaattatcatcaatttaggtgagatggggagaggttatgcaatcaaaacgccaagtttctgaacttaagcaaatgtccataagagagcgcaaaatcgagggcatgcgccgtgccaaagctgctttcgagctggctgagcgttctggtacgttaacaaagcgccctgttgttattgagtgctgatttctctgttatatcgatagtgctccatccaatcactccctttattgagtagtgataggttttggggccaagtaatttaatctgttcagttgtttcagtatccacatccactctagctcttctctttgttccaatatgcctcgtttttagattgtatttaatttttgtttgtttcttgacttacaagtgtagtgatacagcgtaaaatttctttatctgttgattcatccccagcaagagccattttgattgcttgtttcaagcttgatctaatatgaagcttatcaatgacatccttgatatcttgcttttcatgagccattgttaatagcccttcaatacctttacgatgaattaattttataagcttatctacttcgcatagatttaaggagttaaaaaccaagttccaggaatgtcgtaactcaatatcattatagtgtgcatctggtgtttcaaatttgaaatttttatccccattagcaagccaatctaagcttacattttccttattagcaacaatttgcatatattttaatgatgggcttgttcctttgttgatgtagttattgagagttgagtaaggcaagccccaatctttggcggcagtcctaatgtttctttgccctacaagttgtaataacctactgataaaaccttctttttcttcatcactaaaagaagcgtctgatgcttttttgtttttcattttctcaattttcattcaattggttgatttttaataaaaattattccctaaagataatatttttaaatcagggaatttttggtcctaatttgctttacaattttcaaatttggatcaatacttgtgttccagcgaataatttcccaaagattatttgcactgacaattggttagagtaattgaaatatagattgaagtaaaacgtactactaacagagtttaaagcaaagaatgttactcgtcgttttacagtattattagatagttatacccgattggagaattattgtggagaaaaaagattggcacccagcagatattatcgctgctttaagaaaaaagggaacatcattggcagctatttctagagaagcagggctggcatcgtcaacgttatctaatgccttgcaaagaccttggtgtaaaggtgaaacaattattgcaaatgcattgggacagaagcctgatgaaatttggccttcccgttaccagaaaagaaggaagagatatttatctccaagagaaagaatattgtgacagttataggaaccataaaaacaacgctctgaaagtgctgtaacacaatcagagcgcctaaccacaacattataagagctaatgctatggctaatatgaatagtaacatatcctcatactcaaagcgttatacatttaacgcgcaatctaatgtagaaaccgaagcacataccttgcttacagacttttctttggttttaattttttctaaatcaattgggaagcaatattatgcacagtagcgtccctgatactcccgacgacggtgatatatctgatgtgaatatcctatggtctggcatgtcggatgcgattgcatcactggatttttcatgtattagcgatactgtactgtgtcagttaattgaatcatccaaagaaaatactatgggcatgtgtcatggtgtaacttttcttggtgactcaatgttgtcgtttgccagtaataacatccatgaatttacgccagagagtttgtgtcagctcgggcatagcctagaggcgttgagttctctattaccgatgttgtttactctgcatgaaaaagcgagtggtgaatatcgtcgtagaacttcgaaaaacgagataaaatagctttgtcaaatgaaaccggaaaatttttggatggttttccggtttaaaggcataaattatcaccgacagggtattcgatattgtcgatactcatcgggtcgatttttccccttcccagggcctgatgtggtaccgggatgtcgtcaccgtgcactttgcccggcatcagcactcactgacgtagaatattgagggttgcttttgcctcgatcagcacgctcaagaaagtattgaatgccatctgggggcttctgtccagccagttgccaaccattttttcattaacatcgttgagtaagccccggagacaagtgagactgagttgttgcggactgctaggatggcatattgggcaccttcccgtattttgaggaaaagaaaacaatgcgtcatcataacgtaacagatattacggctgtagtactaagtttccacatagcttaagtataactctcactaaccccgattaatttctttaaatttctggatagtgtgtttgatggcttgttctgttggcaaacgctccattgaactggcaccatagaacccatgacaattgggacagtgagccataatcgggaggggtttcagtgctggcttatcgatctggatgaagagttcggcacgtgagtagcccatttttttcatcaccttattgttcaatctttccagtaattctctgatacgttgattcagtgaagcaagactgtagaaggtctcatgccggatacgtgccatgattcagcgttcaacgacctgaacctccacttctgctcaacaaagagttttttacctgctttatgaacctgacgcattgatggtgaggttgttttcagccaatcacggtaaaggcggcagtaatggttataactgtaaaatccgccagggttacgctcaccatattcttcccagagcagttgcagcgttacgcacttattagtcgaatctaccatctataagtatttcttgtggagtagttggcaaaaaagagacagagttagggaaaaataaccattgtttggtgtagtgtatatttcagtttttcaggtgcggtataagctaattttggaaaggtatttatgctcaattcaggggtactttggccagtgtacttatctgatgctgtgatattcatattaataagcttacttatcggtttctgacaaaaagctgggataaagaacagaatattacgttcgatgaactagcaagatgctccctagcgattgctagtatattgcagaaaaaacaacagctaatacatgaacgattgcttgtagcaactgaatccggtattccgtttctcgtggtgttaatggcctgttttttcacgggagttgtggcaatttgctgtacaacttgaaacattgctatcagatgttgatgcgtttgatcctcctagtagttaagaggggatgctcggcgttttaaattggatgttcccagagatactaagcatgggaatagattactttaactttaactttctgataaagattatgaccgaaaatcacatttccctcacagggatagcgaagaaatataaaaagattgaccacctggctattgcagttgtgtcactggataaagcgttgagcatgtatgtggagatgcttggttttacccttgtggaacgtcgagtaacaaagggtgtaaccaccgcgatggaatccgcaattttacaaggaaatggctatacgttggtgctattacagggcacagaatcgcagtctcaggtgacacagtacgttgaacagtatgggcctggtgttcagcatgttgcttttgaggtggagaacttggaagaagtcgtagccgaattagaggaaaacggcattgaattttccacgcagattattagggggggtaacttgaaacagattttcaccaaacgtgacagtgagtcaggaatgatgtttgagtttcttgagaggcatggtgaaggatttgaagaagagaatataaacaacttgttccggcagttggaaaagacacaacaaatttaataacagtaacaggagacacttatgcctctggcaatagaagcaagcgacttggcttttcaggagcacgctgacctgaacacgatgtgttttctcaatgaagtcatagagcgatatcctaatgcgatttcgtttgcctctggtcgtccctcagagattaatgctcggccggaaaaatggtcgcagtatattgcgctgttttcccactatctggccggagcgcgtaataaaagccatcaagagattggtaacttgcttggacagtatggcgatacgcgcggcattattaatccattgatcgctaagcagctatatcttgatgagggaattacgctggagccggaagagattttggtcactaatggtgctcaggaagggatggttatctgccttgatacgctgttctctccagcgcatgatgtattactggtgacagatccagcttatattggtattaccggtgcggccagaatcaaaggcattgacgtggtgtatgttgagtgcgatagcgagggaccgattatctctgcattggagtacagcatcaatagcatcgctgcatcaggaaagcgtgcacgtgccatctacactattcctgatttttctaatccttgtggcagaaccatgtctttggcacggagaaaagaattactggttttttgttatgcacgagaattgtttattttagaagatagcccttaccgtctgtttgattatacgcatcatcaacaaccgacgctgcttgccttggataacgaagcagtggttattcatatcggtacttttgccaaaacattatgtccagcggtgcgtattggttatttgatttgccgggctcacgtaaaacggggggagctggctgtaccactgattaatgatatgacccgagtgaaaagctttatttccgtaaataccgggcaaatcactcaggctattgtgggaggatttctgctggaaaataattgttcattaaagcaaatcacgcagaatatcagtgaacactatcgagcaaagcgggatcgattactacacagcctaacgtgtttctttgctgaaaaagactccactatctcatggaatatgcctaatggcggcttttttctcaacttgagtctacctttcaacctgactatgcaggatattgagcgttgtgctgctgagtttggcgtgattgtagttccaacggcgatattttccaattcagatcgttacaacaatgtactcagactttctttcagctatgttgaatctgacctgattgaagagggggtgcgtcgattgtcctgctttattgccgatcggaggaaaaactcatgagatgagaagagctgtttcttgtccgtagcattattaacccagagggaataaatgaatgaaggtaagccagccagtattgtcactgataaagaagggcatatcgtttcaatttgatccataaattgctgggtgggggaacctgaaccgcccactttgacgcagcttaaacagcataaagtgaatcttttaatacatggcagcgggttgaacagactgaacatgactaccttgcacagaaatcagatgagcaacaaattacttaacgtggcggattaccgcactttggcgaagaaaaaattaccaaagataatttttgactacctagagggcggtgcggaggatgaaaaagggctacgctataatcagcagatttttgatcgctggcgttttataccccatcgattaattgacgtcagtaaaagggatatttcatgtactttgtttaataaggtatggtcagcaccttttgctattgctcctactgggcttaatgccacttttcggccaaatggcgatttgattcttgcccgggtggcagcgaaagagaacattccttttatactctccagtgcggcgaacatgacaattgaagatgtggctagacagtgtgacggagaaaaatggttccagctttatgtagtatgtcccgaactggcagaacaaatggtgaagcgggcgttggcctctgattacaccactttggtaattaccgttgatgttgcggttaatggctatcgggaacgggatatacgtaaccagttctgtctgcctttgcgctatcgtcccgccgtgctgcttgacggctgccttcatccaagctggttgctgcgctttttatgtaacggaatgcctcaattggcgaatttcgtcatgacggagaacataggcgtagatgttcaggtcgcagtaatgagtcgacaaatggatgctagctttaactggcaaagcttggaacagttgcgagctttatggccacataagctcttggtgaaagggcttgtccgaccagaggaagctaaaaaatgtattgaactgggagctgatggtgtgatcctgtccaatcacggtgggagacagcttgatggcacactttccccaatggaaacgttaagtgccacggtacaggcgatgtatcaacctgtcttgatcgatagtggcttccgtcgaggatctgatatcgttaaagcgttggctctgggagcaaatatggtgttgctgggaagggcggtattgtatggccttgcagcgactggtgaacaaggcgtcagtgaggtgatccgtttactaaaagaagatatagaacgtacattggtgcatataggctccccttcaatcagggggttgactcccgattttgttcacaattgttggcagtttgcaacggtcaaataaaactggacaccgttataaatgatgagaagataaaatcttctcatccagaccgctgacaaacctcgttatttttaacgaggtttgttcctttcattatgaatcataatgccatccattttcctcattaacccggtttaatcctccgccagggcgctattttcgcttctcctgcaataaaatactcgctctccagagataaaaacaacacagcattgcgaccagcaaagctatcttcttgatattttgggctgttgccgccaggagacactgtatttgcactttctgcaacccacgaaaacgggcatagcggtgcccgtgatgctgcttcgcatccgcaaaactacgctctatcgtctcctttcttcgcttatagagcttcttcccccacggggttaatcggttttctctggcctgctctttactggcctcccagacatggcgggttagcatttttccgcctttcgcgtgagtgcaggcatcacgctgcggacagctctggcagagagtcgccggcgcttgataatgccggtatccctgacggtcggttgtggtataaatcaggtttttgctctgcgggcagacatagcaatcttgctgcctgtcataggtgaagtgtttcttctgaaaggtgttcggtcccttgtttgggcggcgataaccgataatgggcgtcatgcctaactgttccgtcagataacaaaccggggccgtaaaatagcccgcatccaacccaaccgcaaggggattgagagcaaaacgctctaacctgagaatcctttccgttaacatcccattttgtggttatctgacaacacaaggtgagttcaacggaacattagtacgccagacaagctggcgatagaacagagggtgaaagtcctttccgggtaagagctagccactcgctcggtcctttagctatgcgcgactgtgggtaactcctgtcgtgaagtgttagcgaaggcactcacaggccaggtattgagccacgaaatcggtaaatcggaggtggtgatgcagttaaggtaagcagaaacccacaatggtcaggttgtattggcgaaacctgatcatacctcccggagtcggagaccctgtgcatgtgaggaagttcgtcgcacggaacctgggagatcctgaacggtttcccatcgtgagcagttgggacgataaggtctaagtgtcaaagcagaagccttagggagttcaggaagtcggacgggagtatagtaccggagaaatcagtgaacaaaacagagaacaatgtggcggaattgatggagggaaggctcccgaccaaggggaacagccaacagtgcgcccgtatccggacacagagccggggaaatacgacgttacgcctgctggctgtgcgaaaagcagcaaagagggataggaaacaacagtttactcacctttttcatcacatcagtgaagaacttttatgtcagagttttcagcaacttaaacgtcagtctgccccgggctgcgagggtatcacatgggaaaactaggcagaaaatctgcaaaacaacctccatgcgctccacggcagacttcatcgggggcaatacaggccccagccggcaaggcaggtgatgatcctgaaagaagacgggacagaaaggccatgagtatcctgtgtctggaggacaaaatcgtgcagcaagcggctgtcacggtcttaaatcaaatctacgagaccgattttctcggcttctcgtatgggttcagaccgggcagagggcagcacgatgctctggacgcgttgaatgtggccgttatggagaggaaagtcaattgggtgctggatctggacatcagtcggttcttcgataccgtggaacatgactggctcatccggtttattcagctcaggataagggacggttggatggtgcgattaatcaggcagtgggttacggtggggatagttgatgaacacggtcaccgacagaagtcgcattgtggcacgccgcaaggtgctgtcatatcgccactgctggcgaatatctatctgcactacagctttgatctctggctcaacgcatggcgaaagcgggtgcaaggagaggtggtgatgatccgatacgccgatgatggtgtgccacgaaggcatgcaccggggacgtaagtccccgtgcagctatgcaacacaagagatgagggcaggcccctcgaagccgttttacaggaaatggcttcaaaccccccactgctgctgcgtttaagagacgtggtggtgagcgagatgggaaaaggtcgggcatgatccgatcaggtagggatcgaagagacgaacgaaagtgaaccgttgatgatgtgtcgaaagcgtatagatgatgtcaaaaccatggtggagtcgttcctgtgggataagcgcaggaggcgacctgtttactgcctgcgcggcatccggcataaaggcggcgtgaagtcgattcaggctcttgtggggaacgtgggaacctgtcaccccgatgagaagggagaaacgcaagtggaggtcccatgagcgccagagtaccaatgcggggtacaggggcggagcaagccgtagtagcgttgaaggaccgtaatgggtctggagcaaagggcttgccccattgtgctgatggcacgacagcaaccacgggcgataaagccggtgggaggactgctgtaaaatcggcaaagccatttcctgtgagtaagcgacaggtgtgggatgcgtataaacgagtgaaagctaaccgtggtgcggcaggtattgacggacagacactggccgggtttgacgagaatgttgcagacaatctctacaagctatggaacagactggcttcgggcagttatatgccgcaggcggtaaggcgtgtggagatccccaaagctgatggtggtgtgcgtccgctcggtattcctgccgtgtcggacagaatcgcccagatggtcgttaaacaggtacttgagcctgtactggaacctctgttccatgccgactcgtatggctaccggccggggaaatctgctcaccaggcgattgcgcaggcgagaacacgctgctggcagtttgactgggttgtggaaatcgatatcaaagggttctttgataatattgatcatgccctgttactgaaagcagtgcggcatcacacacaggaacgctggttggtgatgtatatcgaacgctggctgaaggcgccggtgcaaatgccggatggaagggtgcaggtacggaacagggggacgccgcagggcggcgtgatttcacctctgatctcgaatctgttcctgcattatgcctttgatatgtggatgaaacgtcagtttcccggcgtcccctttgaaaggtatgccgatgatgttgtatgccactgtcacagtcagtcgcaggccgaagcactgataagtaaagcaggccagcggttcgcgcaatgtgggctggagttgcatccgcagaagacccggatggtttactgtaaagatgccgatcgacgggggaattacgcagagacgcgcttcgactttctgggctatacattccggccccgtttgtcgaagaatcgctggggtaagaccttcgttaacttcagtccggggatgagtgccagagcagggaaagcaatccgtcaggaggtgaggagttggggtctgcaaaatcgcagtgacaagtccttgtacgatctggcgcatatgttcaatgcgaaaatcagaggctggataaattattacggtgctttttataaatcggccctgtatccaacgctgaggcaaatcgatcgcaaactcgtgttatggctgacccgtaaacataagcgacttcggggccaccggcgacgggccagtcactggctggcgcgtgttgcgcggagtgaaacgaggttatttgcccactggccgctactatgggggcaggcttcaatgggaagagccggatgagcggagacgttcacgtccggttccgtgagcgccttggggggaggttccccggggcgactcgaccagtcctgggcttccagaaacatcaggatgctctggcgtgccaatccctgctacaacgacgactgatgcagtttgggctgaaggtacacccagcgaaaacccggctggtacggtttggtcgctttgcgttaaagcaatatgaggagcgaccggagaggggcaagccggggacgtttgattttctgggattgacgcattatataggacgactacacacgggcaaggatgcggtgatgcgcaaaacccaacgaaaacgatgtcaaacacaactgaagcgaataaagcaggggctgcggcaacggctattcctaccgcgaccgattgaggtaatcaccgatatggcggtcaacggtggtctgatggagtcgcaatgcttgggctatcatcacagaactccacccttcagaagtcagaaggatagcttttattctgtctcgtacttgaccatcacgagttgtgtcgtgaagacgctcaagtttgattttttgttctgatgtaataaatattttcatagcgaggataatgatctccatttcggataaaatcaagcatcttcaatgattacgggtatatacacaatcaagcgaaacagaaagataacaggttttaaaaaaattggtttttcataaccacttatagatactatatcttttctgaattattttgttgcttataaatcgttatgaaaaacaagttatgagttttttctgtatctgtttttgtgatttttattattttatattaactggttgtttttatgtgttattttagtgtggttcatgtttattgtttgaaagttcatggtgatttttaaatgtaaaataatatttgttcttgggttcacatattaatagtaaacgtcatgatgtttgtatttttcaatgaagggctgtgtggtttttaaagctgacaggaaatgttgtcataaatattttatgaatacttgattaattaatgatattatcctcagctcaatgaaatagaaagtaataataaatagttatgataactataggattaacacacttaaaataaccaataaatttattgaggtaataaatgaaagataacattgctacagagggaaatatgtttaaaagcgaagtactttctcagaagttagatgaaaataccccacatcatacagatgagacaccgattccatcacgaaaatgcgttgtagtcggggggacatcccttgcggtgtcctgtgctgaacaaattcaatccgctggacatattatacaagcagtgttatctacagatagtgttttgcaaacatgggctgagcagcaggggattgattgggttaattcggtggaagaattacaagaacacatccagttacagcctgttgactggcttttctccattgtcaatcctctcattttgcctgcctcattaattaaacaaatccgcggaggcgcttttaattatcatgacagtcccttgccgcgttatgcaggtagccatgcaacgtcctgggcgctgttagcgagggaaatagcgtatgccatttcctggcactgtattgaaggcgctgtgaatggcggaaacattgctgtgcaatggccggtctcgattgaagaacaggatacggcttttttattgaatctgaaatgttatcaggcggctcagaaaggatttaatgaactcttaacagcgctgagtcacgacacattaataacctacccgcaaaatctttcgcaacggcgtttttatgcgctgtcgcatcgcccggaggcgggtgggtacttatgttggaaacagccgggcgaggtattgtctgcgttagtgcgcgcattagactttggcgagaatgacgccaatccattaggttacccaaaactgttattaaaacaggatacggtacgaatttcctggcttcagcggttgggtacctgttctggggaaaaaccggggacgttgattcgtgtggaggaggagggctggcaggtgtcgacgggcagtgaggatgtccggatcgggggattttccacattggaaggccagttattgtctgtccgtgagctgacagaaatatcagaactgcaacccggtgaacaattgcctttgatttcgccccaacaggcacagaatatcaagaatacacttcaaaagttcgcccctgatgaacctttctggtgtcagcgtcttaccggctggcaacccagccatttacctttcgatatctcccataagacagcagaaccccgctgggcaataagtccctggcaatctgcgttttcccaaaaaagtcaggaagcgacatggaaaacgttattacaggcattcgttatctatctgacgcggttgacccagcaaacggtatgtcaggttggttggtatgtgggagcaaacgaggagttatcaaatatggcatcgatggtgcccatgaccgttgaagccgaatttaataaaccgtggagtgaggttgttgtcgctgttgataatgaactggccctgctggcacaacatggcacatacagtcgtgaccttttttcgcgttttcctgcactgtccgttatcccagaattaagaacgtgctatccatggccgatagctgtctctgtcgtgccggatagccggttaggtgatcaggaaaggtctagcgaattactgacatttcagataaatacacagggtggtttccgttggatttatgatgaaaatcgtctggatacggcagtgatcctgcggatgagtgaacatttgcagcagttattgtcattagaaaagacaaatgaagccatccccatcgggcagcttaatttgctttctgaaactgaacggatgttgctcttgaaaacctggaatgcgacagcaatgccgtatcctgaagatttgtatattcatcagttatttgaacaacaggtggcgaaaaccccggaagcgacggctttggtgtatgaaaatcagtccctgagttatgccgaattaaatactcgtgctaatcggttggcccatcaacttattgcgttgggcgtagagccggatcagcgggtagcgatttgtgtctcacgttcaccggccatggtggtgggattattggcggtattaaaagctggcggtgcttacgtctcgctcgatccaagttatcctgttgaacgattggcgtatatgctcaacgatgccgcaccggtggttttgctgacccagagcgtgctcgctgacagttcgaagcatgcattctctgcggctgactacacaattgtactgctggatgcccctgacgctgcacaggttgaacaacctgaccataatccggaaccccaaactttggggctgacatcacgccatccggcctacattatctacacctccggttccaccggtttacctaagggggtggagatgccgcaggcgggtctgttaaacctgctacaatggcaccgtcaatccccgtcacaacccgccggaaacggtaaaactctccagtttgccgcactgggatttgatgtcgcttttcaggaaatcttcaccaccttgtgtgaaggcggctgtctggtgctgattaatgagtccctgcgccggcagccggaacagcttctccgcctgatctcgcaacaacggattgaccgaattttccttccctatattgcactccagcaccttgcggaagcagccagccacagcggggaagatttttcctgtctggcccatatcgtcaccgcgggcgaacaactgcgtataacaccggccattcagcgttttctgcaacgtgcagaaggttgccgcttacacaatcactatggcccgactgaaagccatgtgacaacggcatacattctggatcaggatccgaaccggtggcccactttgcctcccatcggtcgcccgattgccaataaccgtatctatattcttgacacgtgcggtcagcctgttccgctggggggacttggggagatttatattgcgggtcaaggcgtcgcacggggttatctgaaccggcctgaactgacggcagaacgtttcctggccgacccgttcagcgataaaccggatgcccgcatgtaccgcaccggggatttggcgcgttatttgccggacggcaatctggaatttttgggtcgtactgaccagcaggtgaaaatccgcggtttccgcattgaaccgggggaaattgaagcgcggctggccgaacacccggcggtgcgtgaagctgtggtgctggcacggggggaagggctggacaaacggctggtggcgtatgtggcggcggacgtggaagaagagctggtgaataacttacgtgagcgcctgagtcaagttttgccggagtatatggtgccggcggcggtggtgcgtctggaccgcttcccgctaaccccgaacggcaaactggaccgccgggcgctgccggtgcccggggaggacgcctttgcccgccagcgttatgcagccccgcagggcgccaccgaaactgccctggcggcgatctggcgagagttactgggtatcgaaaaaatcagccggcatgacaatttctttgccctgggcgggcattctttgctggcggtacgggtgatgaaccggataatgaccgtactgggtgtggagctcccgctggcggcgctgtttcattcgccttcgctggcggccttagcgcaggcggcacagaaacaagaccggcccgccttgcccgccatactgccggtctcccggacggaaactttgccgttatccttggcccagcagcgtttatggttcctggcccagctcgatggggtcagtgaaacgtatcatatccccctggcgctgcatttacgcggccggctggatatcgccgcctggcagcaggccctgaatgccgtctttgcccgccatgaagcattgcgcacggtttttgtttccgttgacggtcagcctcagattcatctgttggcggcagacgacgggttgccgctggtacagcatgatttgcgcgggcatccggatgctgacacggaattagaacgcctgtgtgctggagaaatgtctgcaccgtttgacctcagccggggaccgcttatccgggcggaacttatccgactgacggaagaggattatcgttttttgctgacccagcatcatattgtgtccgatggctggtcagtcaatgtgctgataaatgaactgaacgcactctacgccgcctttctggccggtcagccggacccgctgcccccattggccattcagtacccggattacgccgcctggcagcatcagtggttttccgccgaacgtacccaggtgcagtcggactactggcgcacaacactggccgatgccccggtgctgctggcgttgcccacagaccgtccccgcccgccagagccgtcgtttgccggtcagatattaccggttcacttgggacccgaattaaccaccgccctgaaacagttaagccagcagcacggggttaccctgtttatgaccgtgttgtcggcctggggcgtggtcttatcgcggctgtccggtcaggaggatattattatcggcaccccgagtgccggccgcagccggcaggaagtagaatcgttgatggggttcttcgtgaatacgctggccttgcgtatgcacttctcgggtgcattaacggtcgccgaattgctgacccaagtccggcaaaccgcgttagcggcccaggcccatcaggatctgccgtttgagcaggtggtggaaattgtccaaccgccgcgccggctggcgcatacgccgctgttccaggtcatgtttgcctggcagagcaatgaacacacggactgggcattgccgggcctgatggcgtcaccgattgaccaaactttagatactgtcaaatttgatctcgaactggatatgtttgaggataatggcgcgatttcaggtaatttacgttatgccaccgccctgtttgatcagacaactatggaacgacacattggctacctgcggactgtgttgcaggtgatggtcgctaaccaccaacagcggatcggggaaattgatatcctgacatcggcagagcgccggttattgctggaaacgtggaatgccacggaaacgccgtatcctgaagacttatgtattcatcagttatttgaacggcaggcagcgacaaccccggacgccattgccctggtgtatgaaaatcagtcgctcagttacgcggaactcaacgcccgggcgaaccggctggcacatcaattaattacgctgggggtcgtgcccgaccagttagtggcgatttgtgtctcacgctcaccggccatggtggtcgggatattggccatcctgaaagccggtggggcgtatgtgccgttggatccggcttatcccggtgagcgtctggcgcatatgctcaccgatgctgccccggctattattctggcggatgagacaggacggacagctttgggagagaaggcgctggctggacggaaggtgcttgatccgaatagcctgcctgagcaaccggacagtaatccacagatagcggcattgatcccctgtcatctggcctatgtcatttacacctccggttcgaccggtgcgcctaaaggggtaatggtagaacatcaggcaatttatcaacgctatctgggccttaatgagacttatgcggttacggcgcaagaccggatactgcaattttcatcgtttgcatttgatgcgtcagtcgaggaatttttctcgtcattatgccatggtgccacgctggtgatgcgcgatgataactggttgtcttctatacaagcgtttatttctttaactcagcaaaaccgtatcacggtgatgtctctgccgaccctattttggtctgaactggcgggtagagacaaggcattacgactaccggattgtctcagattaatcattattggtggtgaggagatgaaaacgcgggctattcagaattggtttgcacaggaaactcatcacccacggttattgaatacttatggtccgactgaaaataccgtgattgcgacttgtcaggcgatattatcctcggaggatgatggctcaattggccggccggtaagcaatacttgtatttatttgttagatagatacggtcagccggtaccattaggttgcattggagaactgtatatcggcggcgtgggtgtggcccggggttacctgaaccagcctgaattaacggcagaacgttttctggctgacccgttcagtggtaaaccccatgcccggatgtaccgcaccggagatttggcccgctacttgccggacggcaatctggaatttttgggccgcactgaccagcaggtgaaaatccgtggcttccgcattgaaccgggggagattgaagcccggctgaccgaacacccggcggtacgtgactctgtagtcgtggctcagggggaagggcaggataaacggctggtggcgtatgtggtggcagaagctcatgtggagctagcgaatagcctgcgtgcttatctacaagctgttttgccagactatatggtgccggcggcgtttgtgcgtctggaggcgctgccattaaccctgaacggcaagctggaccgtcgggcattgccggtaccggatgatgactcgtttgcccggcaggcttatgcgccgctgcggggggaaacggaaaacgccctggcggtgatttggggtgacctgctgggcattgagcaagtcagccggcatgacaatttctttgcgctgggcgggcattcgctgctggcggtgcggatggtggaacgcctgcgccagctggggctgacactggcggtgcgcgacctgtttcagtcaccagtgttatcagacctggcgcaaacgctgggacagcatcagaccctggaaatcccaccgaatatgattacccccacgacacggcaactgacgccggcaatgttaccactggtggatttgacgcaggcggatattgaccacattgtcagacaagtgccgggtgggatggcaaatatccaggatatctatgccctgtcgcccctgcaggacgggattttattccaccatttactggcaaatgagggtgatccgtatttgttgaccagccagatggtgtttgcggaccgggccctgctggagcgctatttaatggcggtgcagcaggtggtggatcgccacgatatcttgcggaccgcctttatctggcagggggtatcggttccggcgcaagtggtctggcgtcaggccaccgtgtcggtgacagagctgacgctggatgcggcagatagcccggtcggtgagcagttaaaccggcgttttgacccgtgccactgtcgtctcgagttgagccaggcaccgctgctgcagtttgtcattgcccgggaagaaagcggccactggctcttacaggaattgcaccaccatctgattggtgaccatacgacgctggaggtgatgcaccgtgaagtgcaggcttatctggcagggcgggaagaaaatctgtctgcaccggtgccattccgtcatctggtggcgcaggcccggctgggcgtgagtcaggccgcccacacccgtttctttatcgatatgctggcagacgtggcggagccgacgttgccgtttgggttgacggaagtgcatcgtgatggttcgcaggtaacggagttccaccggttgctggcccctgaattgaatgaccgcttgcgccatcaggcccggcagttaggcgtcagcttggcggcgttgtgtcatctggcctgggcccaggtgctgtcacgtaccagcgggcaggaaaaggtggtgttcggcaccgtgctggtcgggcgtatggcggcgggagaaggggcagacagtgggatggggctgtttattaataccttgccgctgcgactggatatcgataacacaccggtgcgggagagtgtgcggcaggcccagtcccggctggccggattactggcgcatgagcatgcctcactggcactagctcaacgttgcagtggggttgccagtggtactccgttgttcaatacactgttgaactaccgacataatgcgccactggcggctaccgataacatgatggaaggtgtcgaattccttggtgggcaggaacgtactaattacccgtttgccctgtcggtggaggattttggggatgccctggggctgacggcgcaagtgatacgaccgtttaaccctgagcaaatatgtggttacatgcagcaggcattggaaagcttggcggaagcgctggaacacacgccggacaggccggttagggcattggaaattctgccggaagcggaacgtacgctgttgttaaaaacctggaacgcgacagaaaccgtctatccagaccagttatgtattcatcagttgtttgaacaacaggtggggagaacgtctgatgccacagcactcatatatgaagagcaaacactcagctatgccgaactgaatgcccgtgctaaccgattggctcatgaattgatcgttttaggtgtcgtaccagaccagcgggtcgcaatttgtgtggcccgttcaccggcaatgatagtgagcatattggccgtgttgaaagccggtggggcttatgtaccgctagatccgtcctatccgggagcgcgtttggcgcatatcttggatgatatagcgccgttagtagtcctggctgataaggcagggtatgcagcactggatgaaaaagcgttagacggagtgattgtcctcgatccaaatacatcagtaaaccaactggacagcaacccgacggtgccaacactgacctcacggcatctggcctatgtgatttatacatcaggttcgacaggcacaccaaagggcgtgatggttgagcatcgcgggctggttaacctgattcaagagaaaattactcagttcagtatcaaccctgaaagtcgagtgttgcagtttgcctccttggggttcgacgccagcatttgggaaatcatgattgcgttaggaggtggtgccagtctggttatcgctgccgacacagttcgttatgacccacatcgcctctggcattatctggaacaacaagcggtaacacatatcactctgcctccggctttgcttcagaatggagccaatttaccgtcgttaacaataagaccaacagtgatactgtgtggtgaagcgcccaatgcggtattgcttcaggagctatgtgacagggtaattttgtttaatgcttatggcccgacagaaagcacggtttgtgccacgatctggcgttgcccgtcaggctatacagacgcgttagtccctatcggatatccaacagccaacagccaggtttatctgttggatgctgacggccagccggtgccactgggggcggtgggggagctatacattggtggtgtgggtgtggcgcggggttatctgaaccggcctgaactgacggcagagcgtttcttgcccgatccgttcagtgataaaccggatacgcgaatgtaccgcaccggggatttggcgcgttatttgccggacggcaatctggaatttttgggccgcaatgaccagcaggtaaaaatccgcggtttccgcattgaaccgggggaaatcgaagcgcggctggccgaacacccggcggtgcgtgaagccgtggtactggcacgggggaaagggacggacaaacggctggtggcgtatgtggcggccgatgcgaaagcggggctggtcaaccgcctgcgggcgcgcctgagtgcccaattgccggactatatggtgccggcggcgttggtgcgcctggatcgcttcccgttaaccccgaacggcaaactggaccgccgggcgctgccagtacccgggaaggacgactttgcccgtcagctttatgcagccccgcagggcaccactgaaaccgccctagcggcggtctggcgtgagttgctgggccttgaacaagtcagtcggcatgacaatttctttgccctgggcgggcattccctgctggccgtacggctgattgaacgtctgcgtcagctggggttgacattgctggtgcgcgacttgtttcaaacaccagtactgtcagatctagcccagacactggggcagcatcagaccgaaagcgtggcggtgcctgccaatgtgattactccggataccaccacgctcacgccagccatgttgccgctgatagatctgacgcagacagatattaaccgtatcgttgagcaggtaccgggcggcctcagcaaccttcaggacatttatgccctgtcaccgctgcaggacgggatcttattccaccatttgctggcaagtgagggcgatccgtacctgtcgaccggtcagatggtgtttgcggaccgagctgtgctggaccgctacctgtcggcggtccagcaggtgatcaaccgccatgatattctgcgcaccgcctttatctggcagaggctgtcagagccggcgcaggtggtctggcaccaggccccgttatccgtcaccgaattgacattagatccggcagacgggccggtcagtgagcagttaagccggcgttttgacccgcgccattatcgtctgaacttaaatgaagccccattattgcagttcgtcgtagcccgggacacggaagggcgttggtgcttactggaattacagcatcacctgattggtgaccataccacgttagaagtcctgcaccgtgaaatccgggcgtttctgacggggctggcggaaacgctgccggccccggtgccgttccgcaatctggtggcccaggcccggttaggcctgagtcaggaagaacacacccgtttcttcaccgacatgctgtcggaggtggcagagccgaccctgctgttcggcgtggcggaggtccaccgtgacggctcacaggtgacggaattccaccggatgttgccggcggaactgaatgaccgtctgcgtcagcaggcgcagcaattgggcgtcagtctggcaacgttgtgccatctggcctgggcgcaggtgttgtcacgcaccagcgggcaggaaaaggtggtgttcggcacagtgctgttcgggcgcatggcagcgggagcagggatggataacgggctagggctgtttcttaataccctgccactacggctggatatcgataacacaccggtgcgggagagtgtgcagcaggcccagtcccggctggccggattactggcgcatgagcatgcgtcactggtgctggcgcaacagtgcagtggtatcgacaacacaggcccgctcttcagtgccctgctgaactaccggcataatgcggtatcagccctgtctgatgaggagctaaacggggttgagtttatgggcgggcaggagcggacgaactacccgtttacgctgtcggtggaggattttggtgatgcgctggggctgacggctcaggttgtcgagccgtttgacccggcacggatatgcggttatatgcagcaagcgctggaaagtctggcagaggcgttggcgcacaccccggacaggccggttggggcgttagatattctgccggccgcggaacgtaccttgttgctaaaaatctggaatgccacggaaacgctgtatcctgaagatttgtatattcatcagttatttgaacaacaggtggcgaaaaccccggaagcgacggctttggtgtatgaaaatcagttcctgagttatgccgaattaaatactcgtgctaatcggttggcccatcaacttattgcgttgggcgtagagccggatcagcgggtagcgatttgtgtctcacgttcaccggccatggtggtgggattattggcggtattaaaagctggcggtgcttatgtctcgctcgatccaaattatcctgttgaacgattggcgtatatgctcaacgatgccgcaccggtggttttgctgacccagagcgtgctcgctgacagttcgaagcatgcattctctgcggctgactacacaatcgtactgctggatgcccctgacgctgcacaggttgaacaacctgaccataatccggaaccccaaactttggggctgacatcacgccatccggcctacattatctacacctccggttccaccggtttacctaagggggtggagatgccgcaggcgggtctgttaaacctgctacaatggcaccgtcaatccccgtcacaacccgccggaaacggtaaaactctccagtttgccgcactgggatttgatgtcgcttttcaggaaatcttcaccaccttgtgtgaaggcggctgtctggtgctgattaatgagtccctgcgccggcagccggaacagcttctccgcctgatctcgcaacaacggattgaccgaattttccttccctatattgcactccagcaccttgcggaagcagccagccacagcggggaagatttttcctgtctggcccatatcgtcaccgcgggcgaacaactgcgtataacaccggccattcagcgttttctgcaacgtgcagaaggttgccgcttacacaatcactatggcccgactgaaagccatgtgacaacggcatacattctggatcaggatccgaaccggtggcccactttgcctcccatcggtcgcccgattgccaataaccgtatctatattcttgacacgtgcggtcagcctgttccgctggggggacttggggagatttatattgcgggtcaaggcgtcgcacggggttatctgaaccggcctgagctgacggcggaacgtttcctggctgacccgttcagcgataaaccggatgcccgcatgtaccgcaccggggatttggcccgttacttgccggacggcaatctggaatttttgggccgcactgaccagcaggtgaaaatccgcggtttccgcattgaaccgggggaaattgaagcgcggctggccgaacacccggcggtgcgtgaagccgtggtgctggcacagggggaagggctggacaaacggctggtggcgtatgtggcggcggacgtggaagaagagctggtgaataacttacgtgagcgcctgagtcaagttttgccggagtatatggtgccggcggcggtggtgcgtctggaccgcttcccgctaaccccgaacggtaaactggaccgccgggcgctgccggtgcccggggaggacgcctttgcccgccagcgttatgcagccccgcagggcgccaccgaaactgccctggcggcgatctggcgagagttactgggtatcgaaaaaatcagccggcatgacaatttctttgctctgggtgggcattctttgctggcggtacgggtgatgaaccggataatgaccgtactgggtgtggagctcccgctggcggcgctgtttccttcgccttcgctggcggccttagcgcaggcggtacagaaacaagaccggcccgccttgcccgccatactgccggtctcccggacggaaactttgccgttatccttggcccagcagcgtttatggttcctggcccagctcgacggggtcagtgaaacgtatcatatccccctggcgctgcatttacgcggccggctggatatcaccgcctggcagcaggccctgaatgccgtctttgcccgccatgaagcattgcgcacggtttttgtttcggttgacggtcagcctcagattcatctgttggcggcagacgacggggtgccgctggtacagcatgatttgcgcgggcatccggatgctgatacggaattagaacgcctgtgtgctggagaaatgtctgcaccgtttgacctcagccggggaccgcttatccgggcggaacttatccgactgacggaagaggattatcgttttttgctgacccagcatcatattgtgtccgatggctggtcagtcaatgtgctgataaatgaactgaacgcactctacgccgcctttctggccggtcagccggatccgctgcccccattggccattcagtacccggattacgccgcctggcagcatcagtggttttccgccgaacgtacccaggcgcaggcggactactggcgcacaacactggccgatgccccggtgctgctggcgttgccgacagaccgtccccgcccgccagagccgtcgtttgccggtcaggtattaccggttcacttgggacccgaattaaccaccgccctgaaacagttaagccagcagcacggggttaccctgtttatgaccgtgttgtcggcctggggcgtggtcttatcgcggctgtccggtcaggaggatattattatcggcaccccgagtgccggccgcagccggcaggaagtggaatcgttgatggggttcttcgtgaatacgctggccttgcgtatgcacttctcgggtgcattaacggtcgccgaattgctgacccaagtccggcaaaccgcgttagcggcccaggcccatcaggatctgccgtttgagcaggtggtggaaattgtccaaccgccgcgccggctggcgcatacgccgctgttccaggtcatgtttgcctggcagaacaatgaacacacggactgggcattgccgggcctgatggcgtcaccgattgaccaaattttagatactgtcaaatttgatctcgaactggatatgtttgaggataatggcgcgatttcaggtaatttacgttatgccaccgccctgtttgatcagacaactatggaacgacacattggctacctgcggactgtgttgcaggtgatggtcgctaaccaccaacagcggatcggggaaattgatatcctgacatcggcagagcgccggttattgctggaaacgtggaatgccacggaaacgccgtatcctgaagacttatgtattcatcagttatttgaacggcaggcagcgacaaccccgggcgctattgccctggtgcatgaaaatcagtcgctcagctatgcggaactcaatgcccgggcgaaccgactggctcgtcaactcattgcactgggagttcgtcccggcggacatatagcgctgttgtttgaacgctcaatagcactggtggtcgcccagctggcggtgcttaaagcctgtctttcctacacaaatattttaacccgcccccgcgttattgaacttttccctcatagattgatctcaataaaaaacacgacttgaggtaatctttatgttttcaaccagcgccgaacaatgggcaaatgacacgtttcaacatgcggaattaggtgataaacgccgtaccaaccgcctggtgaaagtggcctgttcgttggctaaccatataggacaatcgctcgtgcaatctcttgactctcctgccgatgttgaagcggcctaccgactgacccgaaattccgccattgcgcctcaggccatcgccgaagccggatttaccgccaccgtcgctcacgctcaacgttatcattgcctgttagcgctggaagacacgacaaccctgtcattttcccatgcgtcggtcgccgatgaactcggctataccacctcaaaggaaaaatcccggggcatgcaggcacactcggtgttgttatttgcgcctgaagaacaacaggtcgtggggttgatagagcaacagcgctggtgtcgagatgtcagtgattatggcaaaagccgacaacgcgatacacgcccttatgaagggaaagagagttataagtgggaacgggcctcacaagccgtcgacagccggttaggggagcagatggccaacgtgatttctgtctgtgaccgtgaagccgatatcatcgaatatctgcgttataaaacgagccaaaaacaacgtttcgtcatccgttcgatgcaaaaccggcgtatagaggaaagtcaggataaactttatgactttattagccggttacagagtgctggagaacgattagttcaggtcagacagaaaggcgggcgtcaggcgcgtgtcgcgcattgtgatatcagttatgccgaagtgacgttgaaaatccccgaaggaaaaagcggtgaggcggtgcggatattttatgtcggttgctacgaaaaaggtccggaggatgggctttgctggcatcttctgacctccgaacccgtcaacagtcaggaagacgcccataaaatattcagttattacgagcgccgctggctgatagaagaatttcacaaagcgtggaaaacgggcggcacgcaggtagaagcgctgcgtatgcaaagcaaagataatctggagcgcatgatagtgctgctggcctttattgcggtacgaatacaccagctgcgttttatgggtctgaacaaagaagaggcagagaaagagagctgtgagacagtattaagccccctggcgtggaaattactgtggtcaaaacaagaaaaacgccgtgtgccgaaaaaagccccgagtttgcattgggccttcatcaatctgggaaaactggccggctggtacgattccaaacgcacgggtcgagtcggatgggaacgactttgggaaggctggtttcggctgcaaaccctgatagacggctatttgctggctaaatcagttgatttggagatctgatcaagagacaggcttaaagcgggggcggtttatgtaccgattgatccggataccccggatgagcgcaaactctgggtcatacaggattgtgcggctcagttgctgctgacggataatcacatggcgatcccgaacaatctggcggtgccgttattgcgaatgagggaggaaacagatcccggccgggaagatgacgaacgggatcttaacttaacccgtcggggttcagatgccgtttatgtgatgtatacctccggttcgacgggggtaccgaaaggggttattgtgtcgcatcgtgcggtcatccggctggttatcaataatggctatgcggaaattgaaccggatgaccgggtggcctttaccgcgaatcccgcctttgatgccggcacctttgaagtctgggctccgctgctcaacggcggggcgctggtggttatcgaccgcagtacattattaactccatggcagttagtccgggcattacagagccactgtatcacagttctgtcactggttgtcggcctgtttaaccggctggcgggggagttatccccggttttaccacagataaaaattctgattgttgggggggatgtccttgaccctaatgttattgaccaggtgctgactggcaatccgccacagcaattattacaggcttatggcccgagtgaaggtaccacgtttacgaccacctaccgtattacggcattagcacagggcataaccagcatcccgattggccgccccattgccaatacgcgggtttatgtattgaatgccaaaggattaccggtgccgttaggcgctgtcggtgaaatgtatattggtggtgatggggtcgccaggggctatctgaaccggcctgaactgacggcagaacgtttcctggccgacccgttcagcgataaaccggatgcccggatgtaccgcaccggggatttggcgcgctacttgccggacggcaatctggaatttttgggccgcactgaccagcaggtgaaaatccgcggtttccgcattgaaccgggggaaattgaagcgcggctggccgaacacccggcggtgcgtgaagccgtggtgctggctcacgggaaagggctggacaaacggctggtggcgtatgtggcggcggacgtggaagaagggctggtaaataacttacgtgagcgcctgagtcaagttttgccggagtatatggtgccggcggcggtggtgcgtctggaccgcttcccgctaaccccgaacggcaaactggaccgccgggcgctgccggtgcccggggaggacgcctttgcccgccagcgttatgcagccccgcagggcgccaccgaaactgccctggcggcggtctggcgagagttactgggtattgaaaaaatcagccggcatgacaatttctttgccctgggcgggcattctttgctggcggtgcgggtgatagaacatttgcgtcagcaggggctgacactggcggtacgcgacctgtttcagaccccggtgttagccaatctggcacaaaagctggcgcagtacgcggccgtgcccgtgcctgccaatgtgattaccccggatacctgtacgctcacgccggctatgctgccgttgataaatctgacgccggcggatattgaccgtatcgttgggcaggtgccgggcggcctcagcaaccttcaggacatttatgccctgtccccgctgcaggacgggatcttattccaccatttgctggcaagtgagggcgatccatacttgttgaccggtcagatggtatttgcggctcgggaggtgctggaccgctatctggccgcggtgcagcaggtggtcaaccgccacgatattctgcgcaccgcctttatctggcaggggctgtcagagccggcgcaggtggtctggcgccaggccccgttatccgtcaccgaattgacattagatccggcagacgggccggtcagtgagcagttaagccggcgttttgacccgcgccattatcgtctgaacttaagtgaagccccgttattgcagtttgttgttgcccgggacacggaggggcgttggtgcttactggaattacagcatcacctgattggtgaccataccacgttagaagtcctgcatcgtgaaatccgggcgtttctgacggagcaggcggaaacgctgccggccccggtgccgttccgcaatctggtggcccgggcccggttaggccggagtcaggaagaacacacccgtttcttcaccgacatgctgtcggaggtaacagagccgaccctgccgttcggcgtggcggaggtccaccgtgacggctcacaggtgacggaattccaccggatgttgccggcggaactgaatgatcgtctgcgccggcaggcgcagcagttgggcgtcagtctggcaacgttgtgccatctggcctgggcgcaggtgttgtcacgcaccagcgggcaggaaaaggtggtgttcggcacggtgctgttcgggcgcatggcggcgggagcaggggccggcacagggatgggactgtttattaataccctgccgctgcgactggatatcgataacacaccggtgcgggagagtgtgcggcaggcccagtcccggctggccggattactggcgcatgagcatgcgtcactggcgctggctcagcggtgcagcagcattgacaatgcggggcctcttttcagtgccttgctgaactaccgacacaatgatgtatcagccctgtccgatgagggactaagcggcattgaatttatgggcggacaggagcggactaactacccgtttgcgctgtcggtggaggattttgggacggcgctggggctgaccgctcaggttgtcgagccgtttgggccggagcgggtctgtgactatatgcagcaggcactggacagtctggcggaagcgctggcgcacaccccggacaggccggtgcgtgccctggatatcctgccggccgcggaacggaccttgttactcaccacctggaatgccacggaaacgccgtatcctgaagacttatgtatccatcagttatttgaacggcaggcagcgacaaccccggacgccattgccctggtgtatgaaaatcagtcgctcagttacgcggaactcaacgcccgggcgaaccggctggcacatcaattaattacgctgggggtcgtgcccgaccagttagtggcgatttgtgtctcacgctcactggtcatggtggtcgggatattggccatcctgaaagccggtggggcgtatatgccgctcgaccctgcttatccagatgaaagattggcctatatgttcgaagacgcagctcccgttgcagtactgactcaaaccgagtgggttgaccggctagccagcactgtgcctactgtcgtacttgatgcccaaactcaactttggatgtcatattccaccgataatccagatcctcaggtgttgggactgacatcacaccatctggcctatgtaatttacacctcaggctctacgggacagcctaaaggagttatgaatagtcaccaggctttatgtaaccgcctactatggttcgtccggaatatcgcaacgacaccattggtcggggcactaaaaaccagcatcagctttgttgattctgtcactgaaatgctaggcgtgttgttggctggaggtaaactggttgtattcaatgatcatgaagtgaaagatttcgatcgtttcagtgatggtttacgtcgttttggcgtcaattatctggtggtggtgccttcgctgttaaaacacttaattcaaggttatagcgataaattgaaatccattaggacgttagtttgcagcggagaacggctggctcctgaactggctcggcaagttgtgacggattacccttggctccgtctgttaaatttctatggttcatccgaaattaatggtgatgccacctggtatgaataccctactcagacagaaataccggaagtatcggtgataggccgtcccatcgccaatacccagatctatcttctcgatcctattgggcaacctgtcccgcttggtgtagtcggcgaaatttatatcgccggtgctggcgtggctcatggttatctcaatcgtcccgaattaacggctgaacatttccttcatgacctatatagtgataaaccggatgcacgtatgtaccgtactggagatttggcgcgttatcgtccggacggcaatctggagttcctcggtcgtaatgatcagcaggtgaaaattcgcggtttccgtattgaaccggaggagattgaggcccagttgatggaacatccagcagtgcgtggttccgtcgtgttggcactggatgacgggtcggataaacggttggtggcttatgtgatggcggacgctgaggagggactggttaacagcttacgtatccacctgaattcggttctgccggattatatggtaccggcggcatttgtgcgactagagagcttcccgttaaccgctaacggaaaactggacaaacaggcattgccagcaccggatagcgatgcgtttgcccgtcaacactatgaggcaccacaaggagcaaccgaaatcttgttggcgacgatttggcataaactgctgggcattgaacaaattagccggcacgacaatttctttgccctgggaggacattcactattagctgtaagaatgatgaatcttgctgctgggcagggcttgaatttcacgttaaataccctgtttcagttccctgtgttggtcgaactggcggtaaaaataaccttagaccctctgcttcaaagacaaaatagcgccatatcagtacggcctggtggaacagggttaccgctatttttaattcccactggtacgggagactattcgtatgccttcgggctgtcccagtatatctcatcgggttacccgatttatgcattaccttggccttccatcaatgaagaaccgatgtcaacgatggaagagttagctgccaaaatggttaccctgatgaaagctgttcaatccacagggccatacaggataggaggctattcttccggaggtatattagcttatgcgattgctcagcaacttttgaatgccggtgagcaggttaatttcttggggatgattgatacactagcgcctcattatttaagagaagatcctctgcaaccgaaatatcgtttccttgttggactcactcaacggttagaaggagagcatctagaagagatatcggtgttgcaccagaacattgaagcgttgaatttagttcagttgattgaggccgcacaagaactggaattatatccggcaactctacgtgccgatgtggtcgcaaaatattgggagcaaattgcacgttatgcacaattaattgctaattaacccgaattctgcttaatccgtcattgaaaaatcgtcttctgagtagaaaactttcagtgatggcttcttcaatttaaggcagtaagcaatcaatccacctaaaacgcacaacagaaagccttttatacttcggtggcgggaatgctctatttgagaaagagtttttaattgcccattaatcgtttcaatgataaaacgcttttttaacattatcttatcccactcagcttgcatactcgctttcatgttacgccgttttttcgtgatgaaagtgacatcggttttagctaaatcgtccgccaattcctggctgaggtaacctttgtcaccgtaaagagaacccgttaattcttttgataattcacgaacaggttcccgatcatccacattacccggagtcactttaagcgcgagaatttcaccctgatgattgacaaccaggtgtaatttgaaaccgtaaaaccagcccattgaattttttccgcgctttgctatccccgcaaagaccttatgtcgagggatgcgaatgttatggcagacactcaaacgggtggaatcaataaaagcaatgcctgtgggtttcccttttaattgagtcagatagctgcataatggcaccaaaacggaaggagccacactgacaaaacgaggatagctaagcaaggttggaaaatccttatggtgatatttccaaatatgttctagataaaaatgtttaaaatcacggtaatgcgacatatgaaaaaggatcaaaatggtcatgatttcactgggatacatatgaccttgtcggcggcgtaaacgatgcccgctatcgagacaaaattgttcccattgagggatgaaaaaacggcaaaaatcatcgacatcacagaaaatttcaactaagttgtccatagcctgttcccccctcggagctgtttttggtgcacaccaaaactttgctcctggaacaggcttctcgtcaatttcttatccagaattcgggttaattatgaaccaccaacgttggcagtaactttgcatcagttctatgcaatagaattttctcctgatgccttttttgtgacaaatgagggggccgaatttgtgaacatagagcaatcgttaggttgggagcgaataatgcctgatacactactacagttgattgctattccgggtaatcattcaagtatgatgggggagaatgagaataaaatcacgctagctgaagctatgaatagaacgttattaacctcagcttcgtttaaaaatagcgatatcacaatcccgtaaattcaagctcggttttttaggttggaatgtataagcaattaagccagcgacgatttccaataaaaaaccgagctgactgcgttgtcagataacaacaaaatgggatgttaactgaagggattctcaggccagggcaatagctcattcaaccgactgttcggccagacaggcagtcggctgagaacatcacgtaaccagacccagggctcatgtccgttggctctggcggtttccagcagcctcattatcatggctgcccgttgccccgccggcagggaacccgcaaaaagccagttctttcgcccgagtgccggtcgcggtaggaattgccggtaacggctattcctaccgcgaccgttacagtcagcgggtgaataaatggataccgcccccccgaattgtgcatccttatcctttgcagcgcttttacgccaaacacccgaggtaggagccggatgcgttagtagcgcacgtccggatctgtgcggggggggggatagccggtaacgactattcctaccgcgaccgattgaactcttgtcttcacgccattttcaaacgtatagtacccaccattgtgactataaattgtgtttcctgatgcgtctatttttccagtgttattataaacaccattttttggcctggtaactgaatttccttttggggtatagcccgcaggtaatgttgtcccttttcctgtctgagtagttccctttccgactatattcacagaagttctattagcttttgccccaatagccccgaccgcggtctccagcaacaccagattccgttgctcttccttcacatactgcgccgcatcggctttagataacccggcgttttccagctctttttggcgcagttccgtgttaaagaacccagaaagtggtccactaccgccatttaaccagctgctctgctctgaacggcctagcttgtcattggcacggtatcccgataccgccagttctttacccacctcatggttgataaaggccagctcttcgcggctcaactcaccattcaacgccatttgtttcaaggtattgatggtggcatcactggcctgccggtacgctgtccagacccctttacggcaactgtcatcctgacacgatgccagtttaccgcgcatgtcttcaaccgacggcagacctttatccagaatgcgctggcttaattctttggccttaccgcacggcttccggtgacagcgtgcggcaatcgcccagatttcgggaggccagcgcattattctcaaccttattttacaacatctcgtgataagaataggccagtatgaggatcgaaaaatattcttcttccataaaaatcaacaacaaaatattgcccttcaacaacgttcaatccttcatatgggtaactgatttgaccttctttttgtaaatctgaaggctctatttgccaaagaaattctccattatttgtgtaagaaaatagattatttagtccgtcatctcctataggaatatcagttaagacaagaacagaaccattatcgatttctatcgccttaataatcttttgattaaatataattaagtgcccattaatattaatcttgttatcgtttactaagatagccattttatatcctattttttctgaatagcctgttcattagtgaatgtacctgttctttgccccataagatcaaactgggttcctccacctttatagccaaacagactatttgcagaacctactctcatcttagtacctgctttaatttcaacatccgcaacgtattttggctcatatggcaaagcaaatttttcttgaatttgtttactacttaatccttttatatcttcggctttcatcatccatccccctctcatttgtgaatgagtaccatcataaaccctaacaaattgcgtgttagctgctaattcaaattcctttactgtagttcctggagtatatggaggttgttcatatccctgacttttccaccaattatttacttctgttgctgttacttctttaatgggcttttcagggagtcgtccagaagtacctttgccctcatttatagatgaaatcgtcgtcttatttccagtaatacttttatcagccagagaacctcctttcccctcaaccacttctgttgaccgatacttacttaaagacagatatgctttcgcggctgcaaactgtatcagcttcgcttcactggtaggtatccctccagcaacaatttccgccgctttctgtggcgtcatctgctcatttgataacacgacatctaacggaacaccaaagaagttcccccacgcaataatcagaccttttgccgggtcttgaccctcagggacttgtcctttgaggtagtgagttaaggctgcgttgatttcttcgggtgttgccccggattgagtcatcttttgagccagtgaccctgcgccttcaaaatgtttagcgctttcggaaccaaacaaacttcccatgctaagggcattattatccaccgaattcttcccggcctgcgccccggtgagggcgctggcggtggagtcaccggcaataccgcctgctagcgtggagctgattaaatattaccccggtggactcatgctgccctcttagctttgtaaaggctggatcgttgtttaaaagccacttaatactacttgcccttctgtataacttttaagaatcctactgcttatttcaaatatacacttagtaaaatcgcttattgttagattatatccctcatctgtgatattaatttttcccagaaaacgcaatgctatttcattagaaaatattatgttaaagctctcactggtttcctcaattttctcaataatatattgattatcaaagggtctaccataagggccatcagggagaaagaagtaaagtgattttttctcttttacccaattttcaactatttcttttgtgttcatttcttaattatccagttattgtctagtgatggtaaaaatatttgcgtaccaccaccatgtaacgttggttgagtccctttagttccaatttgtgctgccgctggcccttcataatacttagtacctttggggatctttataatggcttggtttttaaaagtattaccccattcaggtaaaacagcactatccagttgagattgtagaggtccttttgatggctgaggagtccaaaagcgaccatcaactttagcagagccgccataatctctgaaaaaatatatatctgtttctgcgactttttcagtataacttccacttctgaacgttgaagcaggagctcgcaaatcattggggtttcctaatgggccaatttcatgcgggccataagattttatagtttttgatactccttgttctaagttcttcgagacattcttcaccacattagccgctacagcttcggattttgctgccactgcctctgccgcagttttacccacacctattacgccggctgcgcccacaccacccggcgttaatgcttctgcgacctgaatacctgcattatttagacaaattgttggcgcagctttacatccttccagtgcagctcgtgccattgctgcaatttcaggtgtggcggccacaatctgggcaccaccggctactgccattcctcccacagagacaattagatttccattagctatacctttagcaatattacttttgcaagccgtatcacagtccggtgttttagccaaccaaaatcccaagtctgacccggctgctgcacctagggcattattatccgcaacaacccattccattgcgaagttgaccgccaaacaccgattttcccaatgccctcagccagttaccacccgttttttccaatgggcgttcaccgccggccccaaaaccccctgacgcgcttttcgcctccaaaggccggtttttcccgccgtgccattgtcagtgtagcgcctttttcggcaacgggcgaacgtcgcccaactcgcttgggcggcggatgcccgttctgcgggcgcgggcggcatagagcccgcaagcggcgcccctgcgacgctcgggggcaccggggtttcgggttgcgcatgaccttgcatgaccacgcgattttgttcagggaagcccccgggggctgcacggggcggcgatggcgagcacgggaatgagcaaggagcctgcgactgcgaaccgggcgcagccagtgcagcggggttggggcggggggaagtcaatgagcggaggccgcaggccgacctgcctttaggggggttggcccaacggttgcagggcagctaaagaagaactcagagttgccgatgtccggctcagtcggttagagcataaggcgcagccttgtgcgccactccccgcaatgccgacccgcgggggcgcaagacataatgccaattatacgcattaagccgctcatcaatgctcaggcggttgcccgggctcaccggcgcagtgcgtataattcccccgcattatgttcaataggcgttgggcggcctggaccggcttaacggggacgctcgtggttgagccgcctgacgactatttacccccgcgtgcgccgaggctgacgggcagtccggccacggtctgcccccacaccgaacccgcccaacgtaacggggacgggcggacgctcagcggctatcggaggttcaggtcagctctgggctgtccggcggcgtgtcggcatcggcgttatcgtcggcgtacaggtcggccagtaaacccacttcatcggcgtcgcggactttttcgtcggccatttgctccgccggatgcgtactggcgtgcaccgcctgcaaggcccggatagagacctgcgtatacacctgggtggattccacgctggcatggcctaacatggcctgtatccagcgcaggtccgcgccgttctccagcatctgcgttgccatcgcatgccggaacaggtggcaggcaccttttttctcgatacccaccgcgttgatataagctgtcaccagattgctgataccgttagcctgtaagccgtccagcccatccattgcgacgaataatgccttgacgtctggattgacgataagttgtggccgcacctgttgctgatagcgctgtagccagcttaag

SEQ ID NO: 40 - DNA, 696798 bp, Photorhabdus luminescens
gatcatatcctggcattaactgatcaggacatttctttgagttttctgccgttatcccatgtctttgagcgtgcatggagtttctatgtcatgcatgtaggggcacaaaatgtttatctgactgacactaattttgttcgtcaagctatggcggatgtctgcccgacagtgatgtgtgcagtgccgagattttacgaaaaaatttatagtgcggtttttgaaaaggtttctaaggctccttggcatcgaagaaaactttttaattgggcgattaaatgtggtgagcgtcagtttttacgtaagttgcagagtaaaaaaagctgcccttggtcaacagcaatgcatcgactggctgataaattggtgttgagcaaattacggaatgtgttggggggcagagttcggtttttacctgctgctggtgcacgtctggacgaaacgattatcctgttctttctcgctgttgggataaatatcaaatatggctatggcatgacagagacttgtgccacggtttcctgttgggaagagcaaggttatgtacttggttctattggtaaaccatcgcctggcattgacgtccgtatcggtgaagaagatgagatacaagtgcgtggcccaattgtgatgaaaggctatttcaataatcagcaagaaaccaccaaggcatttactcaagacggttggttgcgtacaggtgatgccggtaagttggatgaaaatggtaatttgttcattactgaacgcctgaaagatttgatgaaaacatcgaatggcaaatatattgcccctcaaatgattgaaggcattttgggacaagatcgttttattgaacatgttgctattattgctgatgctcgtaaatttgtatcggctcttatcgtgccttgtcatgaagcattggaagagtatgcaaggtcaattaatctcaaatatcatgaccgggttgaattactgcgtcatagtcagattatcaatatgtttgagcaacgcttgaaagaaatgcagaaaaactttgctcacttcgatcaggtaaagcgtttcatattactgccaaaaccattttcaatggaaacgggtgaattaactccaacactgaaattgaggaggaaaattattatgcagcgttactatgaagaaattgaatctatgtatcaggattgattttcgggattttatacaaagagtgagtattacacgttattcatgggaagtatgggggatattgtagtaatatcccgctttgggttttccctgaaaaatacccgtatttcaagatttaaatactagaaaataaactttatttcagccttaaaatcgcatataaattatattgtctaagaccattttgtgattattaaatattgcagattgaatgatgataattttaaaaattatcagatatttttttctgaaaaatcatattgataagataatataaagtttgtatggtaaataaaatacattttgtgtaattaggtgaattgatgaattttaataatgtagttattgttcatggttttttagcaactcccgatcaccattggtttccttggcttaaagatcagtatgaaaagttaaatatcaatgttattgtgccggaactgcctgaatctcatgttccttccccccatttatggcaagaaaaattgcaggagagcatttcaaatcctaatgaaagaacactttttatcgggcatagtctgggttgcattgctacactccgttatatctcatctttacctgataatataaatattggggggattgtattaattgcaggattttatgaaaaactatcaactttacctgaattaaatacatttactgaagaggggctggattttcacttgctcagacagaaaataaaccaacgaataacaatattatcgcttaatgatgagattgtatcgccacagtttaccttaaatttgagtcagcagctccgggctgaattatatggttttcctgatggcgggcactttttagatcgcgacggttttactgtttttcctaagctagaaaaggtattaaaagataactcaatgttgtgaatcagaatttccttatataaatgaatatgacagaattttttcatgttttatgtaattatgatagactttgtgtgttttaaataagttgtcaaaataatcatttacctactgtaaaataatccgctctgaatacagagcgggattataagtatatttttagttactttttcctactaatgggatgggtttatatcccatgagaattaaaaaattatcccaatgatttattatttcttgagatatttctttttccacgatgcccttttcagcatttattttaatataatgaaatgccttttctaaatcctgtgggctattccctaaaccatgtaaataattcacccctattatctgatacccatttattatgccagaatctccagctctttgaagtagatcattggcttttatttgatcttcttgtactccataaccaaaactataaattataccgagattatataaagattccgcatggtttttatctaactttaatgccttgctataatactcgatggctttttggtaatctctttctgatttctttaatgaactgtcggtataaagttttcctaataaaaaataggcattagagctaccattctgagcttgtttttccagttcccgaaactcttcaactgttctcggtactttcagtggcagttccttaaccatacctgtatatttaattccatcaaatacagttctaggaatatttgttttcgtcggttctgcacatgcattggtaaataatacgattatcagcaaaagtatatatttcattctactagtttatcctatcgagttgacggtaagaagttgaattggtgttatcccgacagagatagtgttgttaatttctgctgtttgctggctgacaaagcaggccatcgcattaattagattatgtaattcgttacttagttcagcttcgtgtatagatattggctcctgtttaaaccagacatccgtgatctctgtctgatatccatttgaccagttgacggtagatgtcagtccgtggtaattaccttgtaggtcaaaataatcgctctcctgatagtttagttgaatagatttaatatcggtttcttcaaggctgttaagttcatctggggtactgagtccgtctaaattcctatcctgccagatttttaatgtgttccaagttacatcttggttatcaataataccgtcctgattgctgtctatatcagctaaagccataaaaccatgttgtgcttttactccagatgacagttgggaattttccccaaacaattcggtgccattattgattaatccgtcattgtttttatcccagactaataggctatcatttgcatcgatccaacctgtattgactttctgcccttgaccgtcaaaatcaaatattactcctaattcactggttactgtttgaacgccatcgccatttaaatcaattactaatggtgttatgtaagttttcgtaacttttttcgggtttgggaaaatttgattgagtacttgattaggagtcttctctaagtttagagtaatgccagagtaaccagcatgtcctccctttctgtgaaacgtctcttttacaaaatcaatacagttatttgttaataaattataggatggtggttgcgtttttccatcccggtaatcaatagttttctgaaaaaccatatcaaggtccatcaagaattgaaggttttgggataccattgttagtgatgaggccgtagggtagcgtatatggtcattaaacgacaaattgtctttaacggtaccccaatcttcccccggacttaatcctgcggtaatggactcaaaattaccagttttggggttgttatttctgatggtatagaaaacatgacccgtaagtgatttacctatattgattccattttctcctgctataggagcaccttggggggctacatgcaaggttatagacggtgtgttttcaaagtatgaaagtttatcgtcgggcataatttcttgatagttttcaaatattcctattgttttatgtttaggttgttgtagcgtttcatcaggcatatgtggtttcttcctcattgatttaaaaaataattcttatctttcagataaagtgttactaaattggttctttttgttttaaaaaatgaattgagaagtcattatcgttcctaaaaggctttcttcggttttggtttttaacgggctgagcccatagtcaataattttcagtcggtcagtttttgtttctacctttatgttaatattggcaactagcatcatttgttcaccattaacagtcagatgatttttatctaactgaatgataggcgaataaattaggttgtatccgtttatatttcttaggacgattattgaattgagggacacaacttggtttccttggcacgaaatgaaatgttgtttataccctatggatttcaagatgcatcgcgacggcaagggagcgaatccccgggagcatagataactatgtgaccggggtgagtgagcgcagccaacaaagaggcaacttgaaagatgacgggtatatctgtattccagacagccctgcataaggcaggcggaaaaaatcttttttgagacttttagtctttaaacacatagtctttaaacacatagtctttgaacccatagtctttaaacccatagcctttaaacccaatttattagcagcaagtaaccactgggttttatctaatcctgcaagcgacaaatcagaccccatcaaacattagaagttaaaattgaattatctatatcataactcattattgcctttgataaataattttaatgatatggtttgattatattgtaaccaaatagtctgattaatttaaattaccatttaattgtcagccttaaatcatcttcttgggagatgatcttttacttattatttaatttgcgtatatgagtataaaaatcatacattaaaatctctgggcaaatattgaatggttgagactgagacgacagggaaataatagactctatcgtattctctaattaaaatggagtaaaaaaattctactcgaattcattatttgcaatggctatccaaaaacgaggaaatgacggtcaaattatctgaggcatttgtctgcatttcctttatcagcttcataccttggtgactgaaacgatcttgaaaactgctttttagttttttatcgtatatatactggataatgcctatacgttgtcgttctttttaggtatagccactcatattctacttacctttagccttttaatagtaagataacgcttacaagagacattttgaatggctagaaagttgctattctgccttgtactcacattgctaacacccgtttctagcgttatgttaattaactcagcatcaatatatcgctgagaggccattcgccttactaaaataaaagtggaaggaatttccgatttattaacttgcaaacagagcctggaggaaaacctatggagatgttatcaggagctgaaatggtcgtccgatcgttaattgatcagggcgttaagcatatattctgttatccggggggggcagtactggatatttatgatgccctgcatacggctgggggcattgagcatatcctggtacgtcatgagcagggggcagttcatatggctgatggttatgctcgatctaccgggaaggttggtgtggtattaatcacctacggtccaggagcaaccaatgccattaccggtattgccacagcttatatggattcaattccgatggttgtattgtccggtcaagtcgccagttcgttgatcggtaatgatgcattccaagaatgtgacatggtagggatatcccgcccgatcgtaaaacacagttttttagtgaaaaaagcagaggatattccgaaggtactgaaaaaagctttctatctagcttccagtggtcgtccgggacccgtcgttattgatttaccaaaagacacggtaaatccggcagtaaaattaccctatatttatcctgatcagataagtatgcgttcttataatccaacgattcaaggacacaaagggcagattaagcgggcattaagaaaactattgaatgcgaaaaaaccagtcatatatgtaggcgggggggcgattaacgcagattgttcagcagaattactggtattggcagaaaaattcaatatccctgttgtgagctccctgatgggcttaggcagtttccctgcaactcatccgcaaagcctgggcatgctcggtatgcatggtacattcgaagccaacaaagccatccataattcagatgtcatttttgctgtcggtgtacgttttgatgatcgtacaaccaataatctggagaaatattgcccggaagcaacggtattacatattgatattgatccaacatcaatttcgaaaacggtttccgcagatgtacctattgttggtgatgctaaacaggtgcttggacaaatgttgtcgttgctggagacagtagaagacacacaagatccagatgcgctaaaagattggtggttatctattcagcaatggcggagccgtaaatgtcttagttttgatcgcagtggtgaaaagattaaaccacaagcggctatcgaggttctctatcgtctgacgaagggagaagcttatgtcacttcagatgttgggcagcatcagatgtttgttgcattgcattacccatttgataaaccaaggcgttggatcagttccggtggtttggggacgatgggatttggtttaccggcggctttgggcgttaaactggtgaaaccggaagcgacggtagtctgtgttacgggggatggtagtattcagatgaatattcaggagctgtccaccgcattgcaatatgggttgccggtactggttctgaacttgaataatcgtttcttggggatgataagacaatggcaagatatgatttatgctggtcgtcactctcaatcttatatggaatccttgcctgattttgtcaaattggctgaagcttacggtcatgttggcatttctattcaacgttatgatgaattggaaagtaaattggccgaagccttgaaagaggtgactgaaaatcagcggctggtatttgttgatatcactgtggatgaaactgaacatgtatatcctatgcagatccgtggaggagcaatggatgagatgtggttaagcaaaacggagagaacctgattatgcgccggattttatctgtattacttgaaaacgaatcaggggctttgtcccgggttgttggtctgttttcccaacgtggctacaacattgaaagtttaactgttgccccaacggatgatccgacattatcgcggatgacaattcagactaagggcgatgcaagggtacttgaacagattgaaaaacagttgcacaagttggtggatgtgttgcgagtcagcgagttggcaccgggttctcatgtggagcgtgagattatgctagtcaaattgcaggccagtggatatggacgtgaagagatcaagcgcagtactgacatcttccgtgggcagatcgttgatgtgactgcgaccttatataccgtacagttggtgggaaccagcgataaattggatgcctttctcgatgctgttcgggatgttgctgaaattgttgaagttgctcgttcgggtattgtcggtgtctctcgcggggataaaattatgcgatgaaaaatcgcaaactgcggggctatgtgcatacatttatcaggctctgcgataaagtagggccttttttgggtctatgaaggagttaatgtgaaactggatgaaatcgcccgccttgcaggtgtttcacgcacaacggccagttatgtaattaatggtaaagccaagcaataccgtgtcagtgataaaacggtagaaaaagtgatggcagtagtcagagagcataattaccatcctaatgctgtggcagccggtctccgtgcagggcgtacccgttctattggtttggttattccagatttagaaaataccagctatacccgtattgctaattatttggaacgtcaggctcgtcagcgtggctatcagttattgatagcctgttcggaagaccaacctgagaatgaaatgcgttgtgttgaacacctgctacaacgtcaggtggatgcaattattgtttctaccgcattaccgccggagcatcctttttatcaacgctgggctagtcgttctttgcctattattgctctcgatcgggcacttgaaaatgaacactttatcagcgtagtgggtgatgattttgaagatgcaaagatgttggcacaagaatttcgtcaattcccggctgaatctgtgctttatctcggtgcattaccggagttatcagtcagttttctgcgtgagcaggggttccgtgaagcatggaaagatgaccctcgtaaagtgatgtatctttactcaaacagctatgagcgtgatgcggctgctgaagtattcaccaaatggttagaaactcatccaatgccacaagcgttgttcaccacctcttttgccctgttacagggggtcatggatgttacccttaaacacagcggccgtttaccaaatcaattggttattgcgacttttggtgatcatgaattattggatttccttgaatgtccagtgctttctgtagcgcagcgtcatcgtgaaattgctgaacgggtattggaactggtgttagcaagtctagatgaaaagcagaagccagggccaggtatcacacggatacatcgtgacttatgtcggcgaggaagcctgagtcggaaaatatgataaaaacccctcattaattttctgatggggggttttggttgtcagattgtcctaaaagaagtgtgtgagggcaacttttaactagttcttacgttgggtgttttacacgatcaaatagcaattttgttcatacataaattattcagtagcaagaagagcatggaacagcgcttatttcagtttgagatttgtctatttacccctgtcttttactgttttttatatattaaattgattttaataatatttatcttgaagtgtttttgttgctagttagttttaatgttgaatgcatcaaatgaaatgataaatatttctgcataatggttaaatagtaatgaaatgtaaattatgtaaataaattaatcacacaactattttttcattattttgccgtaaacattcattcgccctgtgcttgtaaaattattcagaattatcatggtgttaattattattgatattgctaaatttaataattatgcctcccaatagccaaaatcctgccatcaaatatagctaaagcgcatcggctctggcttgacaaggttttcgtcccatccgtaaactccttattgtggggattagtgggataaagtggtaatttttgatcaccaggggcggcctgaggatgtttcgtggagcaacgcagataaatctcgatagcaaggggcggctcaccgtacctacccgataccgggctatgctaaatgaggaatcacaagggcaaatggtttgtaccattgaccttcatcaaccgtgcttgttgctttatacattatctgaatgggaaattattgaagaaaaactttctcgcttatccagcatgaatccggcagagcgtcgggtgcaacgtttgcttttaggtcatgccagtgaatgccagatggatagtgcaggacgtcttttgttagctaatacattgcgtcagcatgcagggctagtcaaagaggtcatgctggttggtcagttcaacaaatttgaattgtgggatgaacaggcttggtatcaacaggttaaagatgatattgcggctgagcaatccacacaggaacctttatcagtacggctacaggaattatcactataaatatggcaaatagtcattttaaacataccagcgtattgttggatgaagcagtcaacgggctgaatattcgtgaaaatggcatctatattgatggcacatttggccgtggagggcattcacgtctgattttgtcgcaattggggactgagggtcgcttaattgccattgatcgagatcctcaggcgattgaagtggcgaaagcgattacagatccacgtttttcaattgtacatgggccattttctaaattggctcactatacagaaaaagccgggctaatcggcaaaattgatggtgtattactggatttaggtgtttcttctcctcagttggatgatccggaacgcggtttttcttttatgcgtgatgggccgctagatatgcggatggacccgactcgtgggcagtcagcagcagaatggctgatgaacgcaacagcagatgatattgcctgggtattgaaaacatttggtgaagagcgtttcgccaaacgcattgccagagcaattgtggcatgcaatcaggaagagccaattactcgaacaaaagcgttagccgatttgattgctcaggccagcccgataaaagaaaaacataagcatccagcaaccaagagcttccaggctattaggatctatatcaacagtgagctggaagagattgagcaggcgctggagggagcattacaagtgcttgcaccgcaagggagactttcagtgattagtttccattcgctggaagatcgtattgttaaacgatttattcgtcagaatagtcgagggccacaagtaccggcaggattgcccctcaccgaagagcaactgaaagcacgcggtgggcgtagcttgaaatcgattggcaagatgaaaccttcagaggaagaagtggctgataatccacgggctcgtagttctgttttgcgttttgctgaaaaagttagtgaataatggcaggtgaacgtcacggattaaccggtattatcggcagcgatttgctcaagaatgccaagataccgttaattcttctagtcgttgtactggtttcggccatagttgttgtaaccactgcacatgaaacccgcttgttgacggctgaaagagagcatctggtggtggaacgtgatgcattagatatcgagtggcgcaatttgatcctcgaagaaaatgccttgggtgatcacagccgggttgagcggatagctgttgaaaaaatgcatatgcagcatgttaatcctgctcaggaaaacattgttgtttcacagtgagttaatttaattattaaaaaggtaagagatgaaagcagtacgctccgtgaagttaaaaaggcaagaagataaagccagttttgttagctggcgttttgctttgttatgcggggggattgccgtagctttaattgccttattgctgagagtgacttatttgcaggtcatcaatccggatcaactggttaaagaaggtgatttacgttccctgcgcgtgcaatcaatccctaccgctcgcggtatgatcagtgaccgaatggggcgacctctggctgtcagcgttccagtcaatgctgtttgggcagatccgaaagaggtatttgaaaaagggggtattacggatgatacccgctggaaagctttatctgatgccattaatttacctcttgaacaacttaacgacaaagttagcgctaatccaaaaggccgttttgtttatttagcgcgtcaggttaacccatcggttggcgattacattcataaactgaaattgccggggatttatttacgtcaggaatcccggcgttattacccgtcaggtcaggtaacggcacatattattggcgtgaccaacgttgatggtcagggtattgaaggcgtagagaaaagttttgatcgttggttgacaggtcaaccgggtgagcggactgtacgtaaagatcgctttggtcgtgtcatcgaagatatctcatctgttgatagtctggcggcccacaatctggtattgagtattgatgaacgtttacaggcgctggtttaccgcgaattaaccaatgcggtggcctttaacaaagcagaatccggtacagcggtgttggtggatgttaataccggagaagtgctggcaatggcaaacagcccatcttataacccaaataatcgcatcaatacgccaaaagaagtcatgcgtaaccgggctatcaccgatattttcgagccaggttccactgttaagccgatggtggtaatggctgcgctgaatgatggtatcatcaaagaaaataccgttattaatacagtaccttataggataagcggtaaggaaatcagagacgtatcccgttatccagaattatctatcactggtattttacaaaaatcgagtaacgtcggtgtttctaagctagcgttggcgatgcccgcgacagaattggtggatgtttattcacgttttgggttaggaaaggcgaccaatctggggttggttggagaaagcagtggcttatatccaacaggaaaacaacggtggtcagatcttgatagagcgaccttttcttacggttatgggctgatggtaacaccattacagttagcgcgggtctatgcaacgattggtagcttgggtatttatcgtcctctgtcaattaccaaagttgatccacctgtgccaggcacaagagtatttcctgagcctattatgcgaacagtcgttcatatgatggaaagtgtggctctgcccggcggcggcggagtgcgagctgcgataaaaggttatcggattgcaattaagacgggtacagctaagaaagttgggccggatggcaaatatgctagtcgatatatctcttacgccgcaggtgttgcccctgcaagtaatccaagatttgcactggttgtgatcattaatgatccactgacaggtaagtattacggcggtgtggtttctgcgccggtatttggtgccattatggggggcgttctacgcatcatgaatgtggagccagatgctttggcggcaggtgataaaaacgaatttgtgattaataagaaagaggatacaggtggcagatcgtaatctacgcgatttactcgcgccgttgggtattgacgccccagtgcgtgagttacgcgaaatgacattggacagccgtaaatcgtctgccggagatctgtttgttgctattaaagggcaccagacagatggtcgacactacattcctcaagccatcgcacaaggggttgcggcggttattgcagaagcccaaggcgaggttgataacggaaccgtacaaattatgcatggtgttccggttgtttatgtgaacgatttgaataataagttgtcacagttagctggtgagttttattgtcaccccggtgataaattgcacttgattggtgtaaccggaaccaatggtaaaacaaccactactcaattacttgcgcagtggagccacgggttaggggaaaccagtgccgtgatgggaacggttggcaatggtttactggggcgtgtggcgccaagtgaaaataccacaggctctgctgttgatatccaactggatttgcaacaacttgttcggcaagaggcgacttttgcggcaatggaagtctcttctcatggactggttcaggggcgtgtggctgcgttgccgtttgaggcggcagtgtttaccaatttgagccgtgaccatcttgattatcacggtgatatggaacactacgaagccgctaaatggctgctattttccactcataatgtgaagcaacaaattattaatgctgatgatgagattggattgaaatggttatcccgtttaccacaagcggttgctgtaacgatggaaaaccgtctgccggaaaattggcagggccgttggttggcagcgcgtgaaataaagtatcacgataaaggggtatctatcaccttcgagtctagttgggggggcggtacaattgatagttccctaatgggggcatttaatgttagcaacctgttgttggcactttccaccctattagctctggattatccattggaaaaactgcttgaaacagcttcctgcctggaacctgtctgtggacgaatggaagtattcactacaccgggcaaaccagttgtcgttgttgattatgctcacacacctgatgcgttggaaaaagctttgatggctgcacgtttgcattgtcaaggtaagctttggtgtgtttttggttgtggtggtgatcgtgataaaggtaaacgtccactgatggggggggttgcagagcagttggccgattatgtgattgttactgatgataatcctcgcaatgaagaaccgcaggcgattattgctgatattctgacgggttttcttgatccggggagagcgatagcgattcatggccgtgttgaagcggtaaccaacgctattatgcaggcaaaagcagatgatgttgtattgatagcgggtaaaggccatgaagattatcaattggtcggccatcgtcgactggattactcagaccggttaactgttgctcggttactgggggtaattgcatgatttccctcactttgcaacaactttcacaagtaacagatggcgtattgaatcaggtgactgaacaacaggctgccaatatttgtatcagtgatgtgactactgacagccgtcgggttggcaatggcagtctgtttattgccttgaaaggtgagcgctttgatgcgcatgatttttttgctgatgcagtcaaagctggtgctggtgctttgctcgtcagccgggtattagatattaactttccacaggtcgtggttaaagatactcgtttagcaatgggtaaattagcgagttgggttcgccagcagagtaatgcccgtgttgttgcgttgacgggttcgtccggcaaaacatcggtaaaagagatgaccgcagcgattttgcgccaatgtggcaacacgctctataccgcaggtaacctgaataatgatatcggtgtgccgctgacattgttcagactgacagaacaacatgagtttgctgtggttgaattaggtgcaagccatgttggtgaaattgcctataccgtagaaatggctcggccggaaacggcgttagtcaataatctgtttgctgcgcatttagcggattttggttctcttgcgagtattgcaaaagctaagggcgagatttttactggtctttcagagaaaggtacggccattatcaatatggaaagcaatgattgggctcactggcagcaggttattggcgacaaaacagtacagcgtttttccatgcaacaagcatcaggtgctgatttttacgctacagatattcaggttaaacaactgacgacggatttttgtctgcatacgcctattggtagcacagaaatcaatttgccgttgcctggaaaacacaatgtcgccaatgcgttagcagccagtgcgttagcaatttctgttggcgcaaccctgcaagatattcgtctgggcttatctgagctgaaagcggtaccagggcggttgtttccaatcaatctggcagaaggaaaattgctgcttgatgatacttataacgccaatgtcggctcaatgactgttgcagttcaggtgttatcacagatgccgggttaccgagtgctggttgtaggcgatataggggcattgggtgaacagtcagcagattaccatcgtcagattggtgaaaccgtagcttcttgcggtatcaatagtgtgttcagtgtgggcaaattaagtattcatgttagtgaagcgagcggttgtggtcagcattttgcggataaagctgcattgatcgcaacattggttccactattacaacaacacaaagtcttttcagtgttagttaaaggttcgcgtaataccacaatggaagatgttgtccacgcattacaggagagcttcacatgttagtttggctggccgaatatttggtcaaatatcactccggctttaacgtcttttcttacttgacgtttagggctatcgtcagcctgctgactgctttggctatcgcattgtggatggggccgcgtatgatcgcctttctgcaaaaattacaaatcgggcaggttgttcgcaatgatgggccggaatctcactttagcaaacgtggtacgccgacgatgggtggtttgctgatcttactttcaattacgatttctacactgttgtgggtgcgcttgaataacccctatgtttggtgcgtgctgattgtgctgattggttacggcattgttggttttgtggatgattaccgcaaagttgtgcgcaaagatactaaggggttgattgcccgttggaagtatttttggcagtccgtcctggcattgggggtggcgtttgcaatgtacagtttcggtaaagatactccggcaacacaattggtcgtgccattctttaaagatgtgatgccgcaactgggtgtgctttatattctgttgacctactttgtgattgtcggaaccagtaatgcagtgaatttgaccgacggattggatggtttggcaattatgccaaccgtttttgttgcagcgggttttgctttggtggcatgggcgacaggtaatgtcaattttgctaactatctgcatatcccttatctgagccatgctggtgaactggttatcgtctgtactgcgattgtgggtgctggattaggtttcttgtggttcaacacttacccggctcaggttttcatgggggatgtgggctctttggcattaggcggtgcactggggacgattgctgtgttgctacgccaagagtttctactggtgattatgggcggtgtatttgtggtggaaaccctgtcagttattttacaggtgggttcttttaaactgcgcgggcagcgtattttccgtatggcacctattcaccatcattatgaattgaaaggctggccagaaccgcgtgtcattgtgcgtttttggattatttctctgatgctagtgctgattggcttggcaacattgaaggtacgttaatcatggcggattatttgggtaaaaaagtcgtcattatcgggttggggctgacgggtctctcctgtgttgacttttttatggcacgaggcgtgatccctcgtgtgatggatactcgtacggcaccacccggcaaggataaactgcccgatggtgttgagtgtcacagtggaagcctgaatgctgactggttgatggatgctgatttgattgtcgtaagcccgggcattgccttggcaacggcggtattgcaggctgcggctaatgcaggtattgaaattgttggtgatatcgagttgttttgccgtgaagcaacagccccgatagtcgccattaccggttctaatggtaaaagtactgttaccagtcttgtcggtgaaatggcgaaagcggctaattggcaggtgggtgttggcggtaatattggcctacctgcattagaattgttgaagaaatcttgtcagctttatgtcttagagctctccagtttccagttggaaactacatatagcctgaacgcaacagccgccgctgtgcttaatgtaactgaggaccatatggatcgttatcctcagggggtatctcagtaccgggcggctaaactgaggatttatcatcaggcgaaaagatgcattgtgaatgctcaagatcccctgacactgcctgaaatgggtatggatagccgttgtgtcagctttggtgtcgattgtggtgactaccagcttgatagtgaaaatgcttttttgaaagttcacaaccaatcactgctggcgacaaatgaaattaagctgactggacgacataactacgccaatgggttggttgcattggctttagctgatgcggttggtattcctcgtgaagccagtttggcaacattgacggtttatccggggcttgaccatcgtttccagcttgctcgtttgaacaaaggagtgcgttggattaacgattctaaggcgaccaatgttggcagtacgatggcggcgcttgatggtctgaatctggagggaacgctttatttgctgttaggtggtgatggcaagtcggcagacttttctccgcttaaacctttcctttgtgggaataaagttcagctttactgctttggtcgagatggaaaacagttggcgcaactacgcccggaaatagcgacattgaccgaaactatggaacaggcgatacgtgatattgctccgcgtctggtggctggcgacatggtgttgttatctcctgcttgtgcaagccttgatcagtttcgtaattttgaacagcgtggtcatgagtttacccgtttggcagaggagttgggctgatgtctattccgggattcagtagattaaaagactgggttattggtggccgtgaaactgatgccaccaatatggtgttgtatgatcgcacactggtttggctgacactcggattgggaattatcggctttgttatggtgacatcagcatcgatgccggttgggcagcgtcttgcagaagacccgtttctgtttgctaagcgtgatgcaatttatctcttgctggctttcgggttgtcattgatcacattgcgtatctcgatggatttctggcaacgctatagcaatctgatgctgcttgtttccgttattttgttgttggttgtcctggtggtgggaaattcagtcaatggggcatcgcgttggattgccattgggcctttgagaattcaacctgctgagttatcgaaactttctctattttgctacctcgccagttatttggtgcgcaaagtagaagaagtgcggaataacttttggggattctgtaagccaatgggtgtgatggtcgtgttagcggtgttacttctggctcaacccgacttggggacagtggttgtactgtttgtaacaacgttggcaatgctatttctggccggggctaagttatggcagtttctagcaattattggttcaggggtattcgcggtggttttgttaatcattgctgaaccttaccgtatacgccgtgtaacttcctttctggatccttgggaagatccatacggcaaaggttaccaattaacgcaatctttgatggcttttggtcgtggggaatttttagggcaaggactaggaaattcagtacagaaactggaatacctgccggaagcacatactgactttattttctctgttttagcagaagaattaggttacgtaggtgtggttttggtgttgttaatgatattcttcgtcgcttttcgcgcaatgacgataggtcgtcgcgcattacagatggatcagcgtttttcgggttttctggcttgttcggtgggtatttggtttagtttccaagctctggttaacgttggggccgccgcaggtatgttaccgactaaaggtttgactttacctttgattagttacggtggttcaagtttgctgattatgtcgacagctatcgtattgctattaagaattgattttgaaacacgcttggcaaaagctcaagcgtttgtaaggagcccccgatgagtggcaaaacccggcgtttgatggtgatggcaggtggaactggaggacatgttttcccagggctggctgtcgctcatcatttaaaagatcagggctgggacgttctctggttgggaacagcggatcgtatggaagccgatttagtgccaaaacatggcattgatattgaatttattcagatttctggtctgcgaggtaaagggatcaaagcattgttggctgccccggtccgaattttcaaagcaatccgtcaggcaaaggcgattatgcgtcgctatcagccagatgtcgtgcttggcatgggaggatatgtttctggtcccggtggcattgctgcgtggatgtgcggtgttccggttgtattgcatgaacagaatggtattgccgggctgacaaaccggtggctggctaaaatcgctacgactgttttacaagcatttcccggtgcatttccaaaagcgcccgttgttggtaatcctgttcgcgaagatgtgttggcactgcctatacctgaacaacgtttgacagggcgtgaaggtccgattcgggttctggttgttggtggcagtcagggggcgagaattcttaaccaggcaatgcctgaaattgctgcccgtatgggtgataaaattactctttggcatcagacaggcaaaggggctaaagaaagtgttcagaatgcctatgacaattcagttaaatgcgaacataagattactgaatttattgacgatatggcacaagcttatgcctgggctgatgtggtgatttgtcgttctggcgcgttgacggttagtgaagtgtcagcggcgggattacccgggatttttgtgccatttcagcataaagatcgtcagcaatactggaatgcgttacctctagaaaaagttggcgcagcaaaaatactggagcaaccccaatttacagttgatgcagtaattgaattattaactcagtggcaacggccacaattgctggaaatggcggaaaaagcccgttcagcagcaattgttgatgcaactgagcaagtatcggcggcattgatcgatgcagcaaaaaaatgatttagaccgccttaaaaggggcggtgaagcaaacatatatagcgaagaagaaaacgtgaatacacaacaactggcgaaattaagagctttcgtgcctgagatgagaaaagtcaggcacatccactttgttggcattggtggtgctggcatgggggggatcgccgaagtgttggctaatgaaggttatcagattagtggatctgatttggcaccaaacccggtaactcggcaactgactaaattgggcgctcagatttattttaatcatcgtcctgaaaatatactggatgccagtgttgttgtggcttcaagcgcaatcttggcggataacccggaaattgttgctgctcgtgaggcccgaattccggttattcgcagagcagagatgttggcagaactgatgcgctaccgtcatggtattgctattgccgggactcacggtaaaacgacaacaacagcgatgatttctagcatctatgcacaggctggtttagatcccacttttgttaatggtggtttagttaaagcagcaggaacgcatgctcgtcttggcagtagccgttatttaattgcggaagctgacgaaagtgatgcttctttcttgcatttgcagccgatggtggcggtcattacgaatatcgaagcagatcatatggatacctatcatggtgacttcgaaaacttgaaacagacgtttatcaacttcttgcacaacttacctttttacgggcgtgcagtcatgtgcattgatgatccggttgtcaaagagttaattcctcgtgttggtcgctatatcacgacgtatggttttagcgaggaagcggacgtacgtattacccattatcagcaaaaaggtgctcagggatattttactgttagtcgtcaagatatggcggatctgaaagtcgtattgaatgcaccgggtcgccataatgcgctgaatgcggcggcagcagtggctgttgcgactgaggaagggatttctggcagtgatattttggcggcgttggcaggttttcagggaaccgggcgccgttttgattttttggggaatttttctctggaacatgttaacggcaaaggtggtagcgcaatgttggttgatgattatggtcatcatccaacggaagtggatgcaaccattaaagccgctcgtgctggctggccggataaacggattgtgatgatatttcaacctcatcgttatacccgaacccgtgatttgtacgatgactttgccaatgtattgaatcaggtagatgtattgctgatgttggatgtttactctgcgggtgaagtggttattccgggagcagatagtcgttcgttgtgccgtactatccgtagccgcggtaagttagatccgattttggtctctgatccggcaaaagtgaccgctgtgttggcacaggtgctggatggtcatgatttaattctggttcaaggggccggcaatataggcaaaatagcgcgtaatctggctgaaacaaaattacagccatctttgaatgaggaaaaacacaatggctgagaaagtcgcggtactgttgggaggaacttccgctgagcgtgaagtttcgctgttatcgggacaagccgtgttggctggattgagagaagcgggtattgatgcacatccagttgatacaaaagattttcctgtgactcaacttaaagaggccggatttgagaaagtctttatcgcgcttcatgggcgtggtggggaagacggtactttgcaaggggtattggaatttttgcagttaccctataccggtagtggcgtgatggcttctgcactgtcaatggataaattgcgtacaaaacaggtatggcagggaattgggttgactgtttcgccgtatgtttcaattaattctcagcaagttgaacgattgactgattctcaactccaagaatatgtagcagatttaggtttgccattaattgttaagccaagtctggaaggttccagtgttggtatgactaaggttaatgagatttcggagttgcgtggtgcattagaggctgcgtttcgttatgacgttgacttgctggtcgaaaaatggttgcacggcccggaatacacagtagccatccttggtgatacggctttaccttctattcgtattcaacccgctgctgttttttatgactatgatgcaaaatattggtctgaagaaacacaatatttttgtccaagtggcttaagtgatgaaaaagagcagcaattggcagaactggcgcttaaagcttatcagtcagttggatgcagtggttgggggcgagttgatgtcatgatggatactgatggtgatttctatctgttggaagtgaatacctctccggggatgaccagccacagcttggtgccgatggctgcgcgtcaggctggattaagtttttcacagttggtggtaaagattttggagttggctgattgatatgtctcaagcggccctgaaagtgaggggacgggataatgaaagtagcagttcccgtcctagtaacggctcttacctggcagggcttatcttcttcctgatggtacttgggaccattatttggggaggtttggccgtccttaactggatgaaagatgctaacagattgcctatttcaaaactggtggtaacgggtgagcgtcactacacgaccaacgatgatatccggcgggcaattttgtcattagggcaaccgggaactttcatgacgcaggatgtgaatatcattcagcaacaaattgaacggatgccgtggataaggcaagtcactgtccgtaaacagtggcctgatgaactgagaattcatctggtagaatatgttccttatgtgcgctggaatgacacacagatgctggatgccgaaggtcaggtattcagcattccggctgaatggggagctaaagggtattttccgatgctttatggcccacaaggcagtgaaaaagaagtccttgatggttaccgggccatgactaaacttctcgctgccaataaactgaaattaaaatcggcggcaatgactgcgcgtcgttcctggcaactgactctggataatggtatccagctaaagctgggaagaatggatacaacaggccgtattaaacgttttatcgagctttatccgctgttacagcagaacacagagaaaagggtagattacgtggatttgcgttatgacagtggtgccgcggtaggttgggcgcctttacccattggtgatcctaatgctccggtcaaaaggcaataaacaattactggcaataattatatgaggcaggcagaacaacgatgatcaaatcgacggacagaaaattagtagttggcctagagattggcacagcaaaggtatctgcccttgttggtgaaattctgcccgatggtatggttaatattatcggggtgggaagctgtccatcccgcggtatggataaaggcggtgtaaacgacctggagtcggttgttaaatgtgtacagcgggctatcgatcaggctgaattgatggcagattgtcaaatttcctctgtttatctggcgttatctggaaaacatatcagttgtcagaatgaaatcgggatggttcctatttccgaagaggaagttactcaggaagatgtagacaatgttgttcatactgccaaatcagttcgtgtacgtgatgaataccgaatactgcatgttattccgcaagaatatgctatcgattatcaagaaggtattaaaaatccggtggggctttccggtgtgcgtatgcaggctaaagttcacttgattacctgtcataatgatatggcgaaaaatattgcaaaagcggttgaacgctgtggtttgaaagtcgaccagcttattttttccgggttggctgccagctatgctgttttgaccgaagacgagcgtgaattgggcgtttgcgtggtagatattggcggcgggacgatggatattgcggtgtataccggcggagcgttgcgtcataccaaagttattccttatgccggtaacgttgtcaccagtgatattgcttatgcctttggtacgccaccaagcgatgcagaaacgataaaagtacgccacggttgtgcactaggttcgttggtcagcaaagatgaaagtgtggaggtacctagtgtcggtggacgcccaccacgtagcttacagcgtcagacgttggctgaagtcattgagccgcgttacatcgaattactgaatttagtgaatgatgaaatcttgcgattgcaggaacagttacgccagcagggggttaaacaccatctggcggcgggtattgtcttgactggcggtggtgctcagattgatggtttggctgaatgtgctcagcgtgtgttccatgctcaggtgcgtatcggccaacctcttaatattactggtctgacggactatgcgcagcaaccctattattcaacagcggtagggttgctgcattacggaaaagcctctcatcttaatggtgatgcggatattgaaaaacatgtttcagtgagccgttggtttaagagagtcagtagctggctgaaaaaagagttttaattttatacagaggctgagtttttttagtctcgatataaaggcacaaagcggagagaaactatatgtttgaaccaatagaattaaccaatgacgcggtgattaaagtcatcggcgtcggcggtggcggcggtaacgctgttgagcacatggtgcgtgaacgcatcgaaggtgttgaattctttgcagtaaatacggatgcccaggcattgcgtaaaactgctgtcggccagactatccagattggtaatggtattactaaaggtttgggggctggggcaaacccggaagttggtcgtactgctgctcaagaagatcgtgatgcattgcgcaccgcacttgatggtgcagatatggtatttatcgctgccggtatgggtggtggtactggtactggcgcagcgcctgtggtagctgaaattgcaaaagagcttgggattctgacagttgctgtggtgactaagcctttcaatttcgaaggtaagaagcgcatggcgtttgccgaacaagggatcactgaattgtctaagcatgtagattcattgattactatccctaacgacaaactgttaaaagtgcttggccgcggcatttcactactggacgctttcggcgcagctaatgatgttttgaaaggtgcggttcagggtatcgctgaactgatcacgcgtccaggtctaatgaatgttgactttgctgatgtgcgtaccgtgatgtccgaaatgggctacgccatgatgggttccggtattgcgcagggcgaagatcgtgcggaagaagctgctgagatggcgatatccagcccattgctggaagatatcgacttgtcaggcgctcgtggtgttttggttaacattactgctggctttgatctgcgtttggatgagttcgaaacagtgggtaacacgatccgtgcatttgcatctgataatgcaactgtcgtgatcggtacctctctggatccagacatgaatgatgagttgcgggtgactgtggttgccacgggtattggtatggataaacgtcctgaaattacgttggttaccaataaatcttctcagtcaagcgtaatggaacaccgtcatcagcaaatgtctggcggtatgtcttcattgtctgaagaaaataaaccagcagcaaaagtggtgaatgaccaaagcgtacaaacgagtaaggagcccgattatttggatattcctgcatttttgcgtaaacaggccgattaatagctaaaaaattggattctccgctttttgtgctaaacttgcccgccaatcatagtgtatagtgattggcaggatggataatattgcgagataaaacgatgatcaaacaaaggacacttaaacgtattgttcaggcgactggtgtcggtttacataccggtaaaaaagtcacactaacaatgcgcccagcaccggctaacaccggggtcatctatcgccgtactgacttgaatccaccggttgattttccggcagatgcaaaatccgtgcgtgatactatgctctgtacttgcctggtaaatgagcatgacgtgcgaatctcaacggttgagcacctgaatgcagcgcttgcggggttaggtatcgataatattattatcgaagttgatgcgccagaaattcccattatggatggtagtgccagcccatttgttttcctgctgctggatgcgggtattgaagagctgaacacatctaaaaaattcctgcgtattaaggaaaccgtgcgcgttgaggagggtgataagtgggcagagatgacaccttataatggtttcagtctggatttcactattgatttcaatcaccctgcgattgattcaagcactcaacgttactgtctggatttctcggcagaggcgtttgttcgtcaaatcagtcgtgcacgtacatttggctttatgcgtgatattgagtacttacaatctaaagggttgtgtttaggtggcagctttgattgtgcgattgttgttgatgactatcgtgtgcttaatgaagatggcttgcgttttgaagacgaatttgtccgccataaaatgctggatgcaattggtgatctgtttatgtgtggctataacatcattggcgcatttactgcgttcaaatctggtcatgcgttgaacaataaactattgcaggcagttctggcgcaagaaagtgcatgggagctgactactttcgaagatgaagctgaaatgccattggcttttcgtgctccatcaactgtaatggcataactctctagtatgctgataataatttaatgatatatcagtgggttatgttatcagtgattttattttcgctgatgttttttactcggcgttagcactattcagcgttagcacttaaatttatttagcgttatcgcttagtcgttttagctgtactggcactctctccggccagtgcagctagtcgttctaatctttccttcagcttttttggactacggttcgctagcgttattaattctttcgcactctcttgacttaactgacgtgtcggtaaagttttatgatcatctctcatcgtttttgcgaagctctgcgcactattgccatgcttaatcatgagtgatgggttaatcctgatgtcgatagatgacaatgatggtagaattccgcttcttagtgtagaaagcagcgttggcagctcgtaacgtaatctggtcatccaactggcgtttcctgcttccagtaccagaatttgtttgcgataattagcgacccggcaccacggatgtaattgtgcgggaagcaagctgataacggcacggttaagttttaacaaagcgacggcacgttgctggataacatgaagcgggcttttctcaacggcggcggcgtcttcaaaaagaacatctaatgattgtgggcggctatcgcgcataatgaaagtagctccggtatgatgaaggattaatgggtattctaaatctttggcgacaatttggcagacgttatttctggtcacatctgttattaggggtggttgcggcaagtattggcgctcctaccattttagcgggtgttaccgataatatctcacaagctaatacctcgcctagtcagagctggcaaaatcaggctttatcggcttttgataatctattttcattgcagaatgttcaacaccagccagccaatggcgttaattactggcaacaacatgctgtacgtaacgtgatcagacagctttcttttgctttttctatttcgcagcctatgagcgatgaaacagcaaaacaaagtatccggttaagttcttccaatattcagcagcttgtgctggaaaccctgaatacactattaattcgggaacctaagccacctgagccggttttagatataccgttcctgaatgttgcatcacaatcttcttatattctgacgctttggattgctaaagcccaaggtatccgtgcaggtcctactgcttacctctgaatcttcgtttttttacaaattttcgaaataaataactatttgctggctgcgaaataacggccttatctgagatgtaattaactatgctgattaaattattaacaaaggtttttggtagtcgtaatgaccgtacattgcgtcgtatgcgtaaagttgttgatgtcatcaaccgcatggagccagagtttgaaaaattgtctgatgatgaattgaagggtaaaactgccgaattccgtgcccgtttagaaaaaggcgaatcgttggaaaatctgttacctgaagcatttgcaacagtacgtgaagcaagtaagcgcgtgtttgctatgcgtcatttcgacgttcagttactgggtggtatggttctgaatgaacgttgtattgcggagatgcgcactggtgaaggtaaaacactgacagcgactttgcctgcttatttaaatgcattaactgggcgtggtgttcacgtagtcactgtgaatgattatctggcgcaacgtgatgccgaaaataaccgcccactgtttgaatttctgggattgagtgttggtattaacctgccaggtatgccggcacccgttaaacgccaggcatatgctgcggatattacctatggtactaacaacgaatatggctttgactatctgcgtgacaacatggcatttagcccggaagagcgtgttcagcgtaagttacattatgcgctagtggatgaagttgactccattctaatcgacgaagcacggacgccattgattatctctggccctgctgaagatagttctgagctttatatcaaagtcaataagttgatccctaaattgattcgtcaggaaaaagaggattcagagactttccagggagaaggccatttttctgtcgacgaaaagtcccgccaggttaacttgacggaacgcggtttagttttgattgaacaattactgtcagaagccagcttgatggaagaaggtgaatccctatattcgccaaccaatatcatgttaatgcaccatgttacagccgcactacgtgcccatgcactgtttacccgtgatgttgactatatcgtgaaagatggtgaggtcattattgttgatgagcatacgggccgtactatgcaggggcgtcgctggtctgatggattgcatcaggctgttgaagctaaagaaggtgtagaaattcagaatgaaaaccaaaccctagcttcaattaccttccaaaactacttccggttgtatgaaaaactggcgggtatgaccggtacggcagatacagaagcgtttgagtttagctctatttataagcttgataccattgtggttccgacaaaccgtccaatgatccgtaatgatttgccagatctggtttacatgaccgaagctgaaaaaattgaagctatcattgaagatatccgcgaacgtaccggtaaagggcagccggtattggtggggactatttctattgaaaaatctgaactggtttcccgtgaactgactaacgcgggtatcgagcacaacgtacttaacgccaaatttcatgcaatggaagcggacattattgctcaggcaggtcaagcgagcgcggtaaccattgcgactaacatggcgggtcgtggtacagatattgtgctaggcggtagttggcaggcagaaattgctaagctgaccgagccaacagaagctcagattgaagagattaaagctgcatggcaggaacgtcatgatagggttctggcggcgggtggtttgcatattatcggtacggagcgtcatgaatctcgtcgtattgataatcagttacgcgggcgttccgggcgtcaaggggatgcgggatcatcccgtttctatttatcaatggaagactcactgatgcgtatttttgcctctgatcgtgtcactagcatgatgcgtaaactgggtatgaaaccgggtgaggcgattgaacatccgtgggtaaccaaagccattgccaatgctcaacgtaaagtagagagccgtaacttcgatatacgtaagcaattgctagaatacgatgatgttgctaacgatcagcgccgtgctatttatgctcagcgtaacgacttgttggatgtgagtgatgttagtgaaaccattggtagcattcgtgaagatgtatttaaagcaaccattgatgcttatattccccctcaatctctggaagagatgtgggatgtggaaggtttgcagcaacgtttagtgactgatttcgatttagagctgccgatcaaagagtggttggataaagagcctgagttacacgaagagacgttgcgtgagcgtatccttgaacaggctgttgaagtctataaacgcaaagaagagattgttggcattgaaatgatgcgtaatttcgaaaaaggtatcatgttgcagactctggatatgttgtggaaagagcatctggctgcaatggattacctacgtcaaggtatccatctacgtggttatgctcagaaagatccgaaacaggaatataaacgtgaatctttcgctatgtttgcaagcatgctggaatcgctgaaatatgaagtgattagtacattgagcaaagttcaagtgagattgccggaagaagtagaggcattggagcaacagcgccgggcggaagctgaacgcttggcaaagcaacagcaattaagccatgaggttgaaaaaggcgcattgatgtctacaacagaagctcagattgccagtggagctcgtaaagtagggcgtaatgatccttgtccttgtggatcgggtaaaaaatataaacattgccacgggcgcttgcagtaacgatgaaaaggcgggaaaccgcctttttactctgttagttttaagtgagcaacgtcaacgttggatatagtatttggttgttgagcaatcaaaaagaagagatgaagaagtaagagtaatatggaaaagaaacacctacatatagccgctgggattatcagaaatacgcaacatgaaatttttattactcagcgtcatgctgatgcccatatggggggggtctgggaattccctggtgggaaagttgagcaagaagaaacgcctgaacaggctttaatacgtgagttacaggaagaaattggtattacagttattcattatgatctggtaaaaacggttgaacatgattttcctgacaggttgattaccctgtatttcttcttggtggatgaatgggaaaatgagcctttcggtaaagaagggcaactttctcggtgggtattacagaaagatttaattgctgatgaattcccgcctgctaaccgcagcattgttgcattacttaccgcttgagttgtcaatagccgcattattaataacgcggctatttattattgctcaggttgtccactccaatcatcactatcagagttttcactttggcttggtatccgcttctcttcatttgcccactggcctaagtcaattaattgacagcgtttactgcaaaatgggcgatatgggcttatttctccccaaaccacagttttaccacatgttgggcattcaatcgtgagtaattcagacataataattttcctgataattagttcgtaatattagcagcatgccaattcaaatggtaaatgagcaggcacggagcctttttcactatccaatggtaaaaaacggatagcaaagcgggtcttatgaccggaaatttggggaaacaataaaggggttaatggcaaacgtaatctcagtaaatctgcgccttctgctgtattctgatggaaaccgtttttactgatttctgaacgaaaaatagcagattggcggatgagttctaaaatactgtccagggcttgttggagaggtagcaaactatcaatccagaatgcgaccattttatctctttctgattgtggtaagtgaagccatagatgtagggtgggtagatcaaaaccacaacaaccactgggaatactgaggcgctggcgcactaggctgataattttatcttctttaagggattgccctaatcgtggtgctttacttaatgcaatagcccgctctttcaattttaatctgaaactattgacgatatttatatcaacatcgggtatttcagcccattgttttaattttgcctgttgacgttctaattcttttagcaattctgaacgtacttccccgcgttctagcacttcaagtaactcagttattgtgcggaaaaaggcgaggctgcttgccaatgagtttaaatggcgttgacttgtgagttgttgtagggaagattcaattctcaaccatgctcgcattttttcattcagtggatgttcaaaaatgattgtagaagttgtgtcactcatcatgattgtcctgtctggctgattcagctaatcttaagtattgttgatgtaattcggcaacacgaggagtaattgcctgtacgttatcatgatttgagataatgtcatcggcataagccagtctctcgctacgggatgcctgtgccgccaaaatattttcaatttgttggtagttaataccatcacgagtggctatccggctgatttgtatttcaggtgaaacgtcaacgactaaaatccgatctgccagatgccttaaattattttcgactaataatggaataacccaaataacataaggtgctattatctgttctaattgccgtcgggtttcttgatgtattagagggtgaagaagttgattaacccactgtttttcttgattgtttgtgaatattttctggcgtaacagtgctcggttaaggttaccatcgggtgtcaatatgtcatgaccaaagtgttctgtgatggcttgtagagcgggcgttccaggaacaacgatttctctggcaataatatctgcatcgacaagaggaacaccaagcgcagcaaaagcattggcgatagtggttttaccactgccaattccacctgtgagtgcaataatataagtcatcctatcccttaatattacttgataatatttcaggattgtaaccgaaaggaggcagatgacctagagacaaagctatggaatcatttttactttaggtgagtatcgtacctagctgaaaaatgggtaaatacattgccagcaatagcgtaccgacaataatcgctattatgactataagtattggttctagtaactgtgtcatattatcagaaatctccaatgcttgttgttggtaccaattagcaagatttcctaataacagttccagattgccagattcttcgccaacactgacaaactgttgacacagagcaggaaaacaagattgttgtttcagtgtttcgctcattggtaccccttgattaatttgagctcgtaagaatttagtcgcttgcaaaaataccggatgatttattgatgcaatagcactgtctaaccctgcggtgagtgtcaggccggctttttgtgtcataaacagaatatggaaaagttgtcctaattgctgacaactaattaattttgcaataacgggtaaacgtaacattagatttttttcacgagtaatccatattgtatggcgttgacgtaattgtagataaaatagaagcagtagaattaatccaataacaccatagccaccgtattgaatcagccagttggaagtgattaataaactgcgggtgagcagaggaagttgtgcatcaaatgaatgataaatatgttcaaattcaggtaaaacaaaaataagcatcaataaaataatgatgctggcaacaatggtaataatcagaggataacgtagcgcttttgttattttcttctgtaacttatcttgttgctcctgttgtttaaccaataattgacagcagacttctaattgcccggttaactcaccaacagaaataagttgacaaaataaaggtgggaatagaaatggataattttttaatgaggaggaaaatgattctccacgggtaattttcttgctaatatctaataatacacaatgccataatggatgagcgcattcgcgaataagaatattgaggcaattcagtaatggcattcctgatgataatagtgttgccaattgacgaatgaaattcaaacggtaggcaatttgttgatgatgataaaatatcaatttttcacattttatattataaggttgcaatccagaatgaataagctgctgatataaagctttcctgttatcacatagtgatttcccttttgatatttcgcctttgttgttcactgcttgccaattataaatataatgaattttcattactattcctgacctgtgacttgataaatttcttctaatgtcgtgatgccttgttccactaataaaataccggatgaaagtaaagtgtcttttctttgagccataatggtgttttgaacatttttaggattctgttctgataatatttgttgaatatcataagttatttctaaaaattcataaatagccgttcggccataataaccggagaaacaatgttcacaaccaactgctaaccattgattaataaatagagaattgttttcaatattaataacggtttcttctgtttgttgtttacggcaatgaagacataattttctgacaagtcgttgggcgataattaatttgatacaagaagcagccatataacctgaaatacccagattttgtaggcgcgataatgtatctatggttgaattagtatgcaatgtagaaagaaccaaatgacctgtttgtgccgcttttactgaaatttcagctgtttcgccatcacgtatttctcccaccataatgacatcaggatcttggcgtagtaatgcccgtaatactttggcaaaattgagctcgattttgctattagtttgtgtctgattaatgccattcagtgggatctcgacgggatcttctacactgcaaatattctttttattctgattcagatattgtaagcagctatataaagttacggttttcccactacccgttgggccagtcactaaaatcattccttgtggtaatgcgagtttttgtcggagctgatttaataatgggtcaggaatacctaattgatctaacgataattgctgcattgtatttaatattctaagcacaactttttctccgtgtatggttggcaaagttgccatacggatagcatagttgtgtcgggtgtcaaaccaatcaaattgtccatcttgaggtaaccgtttttcagcaatattcaatttcgccattattttaaggcgtgcggcaatgcttgcattcatttgataagatggcgaagacaataagtgtaatgagccatcaactcggatacggatacggtaaccttgttggaatggctcgaaatgaatatcggatgcacgccgttgaattgcagttaataaagtttgattaataagttgaatgacgggggcatcattttcatctgtattgatatcagttttaagtggtaatagagaggattcttcctctggtacatgactcagtgaaatattttgatgtaatactgattcgatccttgccagtggccaaatttctacattaacaatacatccggaaataaagcgtaatgctgataataaatcatcattgggtaattcgctgctggcaattgttatcgtattatcatctttttttatcacaacagattggtggcgttgacaaatatcatgaatttctttttccattaatgtattttccgttgctgaaagtgagttcattattgcttcctgtgtaagtgtgtattgatatacccgtcatctttcaagttgcctctttgttagctgcactcgctcaccccggtcacatagttatctatgctcccggggattcactcctttgccgtcgcgatgcatcttgaaatccatagggtataagagttaatgaattaaaattcaaatatttcctgacaacgactttttaatgaattgtttgtcgattcacatttaatattccatttaattatacctgtttgtgtattttgtgtcggctttaatgtaacgctgaggtttttaagactctgtttaccgttaatggtaacttccccatttttaactgaaatgttatcgatatatctgctgttatgttcttttggaattgacactgctcctgcgttgcaaccattgaaatcttcagtttcaaaaccgcaaagttctatacctgatttataaggtacaatattttgtagtatatctgttaaagcggctttctggatatatccttgataactaggaataccaatggcacttaagatggaaatgatagcaatagcaaccatgatctccattaaagtaaatccttgttgtttcatattttttctccgtgttgtggtattgcgatatagagaatgaaggaaagagaaaaaaatgaaataggatatatgaaggttatggaattgactcgaaaaagaatttttggattacaaggtttgcaaaaatatttacggtggtgttcgcaaatttgtgagtaactaattgctgatttacaccaccatcaatataattattgctaattaaagcgcatggagagatctaatgctctaatatgtttggtgagtgctccaacagaaataaaatcgatgcctgtttcagcatagctgcgcaaagtatccagggtgatattaccggatacttctaaagcgactttacctgatgtgatagcgacggcttctttcatcattggaatagtaaaattatctagcataataatatcaacattagctttgagtgccagaatgagttcatctagcgtttctacttcgacttcaacagggacatcagggtgagaataacgagctttatctactgcctgtttaatagagccattggcaataatatggttttctttaataaggaaagcatcgaataatccgaggcggtgattattaccacctccacaaagtacggcatattttaaggcggtgcgtaatcctggtagcgttttgcgtgtatcaagtaattgagtttttaaaccggtaagacagtgaacataatgactgacttccgttgcaacgccagagagagtttgaataaagttaagggcggtgcgttcaccggtcagtaatatctgtgctgggcctcgtaataggcaaagtttttggttggctgtaattgcatcactatctttgactaaccattcaatggagatctggtcgcctaattgagtaaaaacttcattcagccattgttgtccacagaaaatgccatcttcccgagtgataatgactgcggtggcttgtttatctgcgggaattaattggccggtaatatcagcggtgaaatttgtatttccacccagatcttcttttagtgcgagggttacactggcaggaatgtcgttttgcaagtgttccataagaacagcacggcgctgatccgtattgcaattttgttttgtcattaaaaagctccagaggtgataacaatattgatggtcttaacatgctaccctgttgtgtagtgaacaactactatcttggttttatcatctagattaaggaaaagaaaaaatgtggttgcatgatgaattgagttagaaaaattctttcacacgatttgtgcccacaggtgagcaactgttttattggttattcatcgtattagtttgtctccgggaaagctttgttgtactgacacaatggtttataggtagacccggatatataccctatggatttcaagatggatcgcgacggcaagggagcgaatccccgggagcatagggaactatgtgaccggggtgagtgagtgcagccaacaaagaggcaacttgaaagatgacgggtataaaagagcatatcactggctataatgatgttgttctgggaagaaaaattgatctgggactttatttcgattggacacattaccagcaattgttacaggagcagaaagaatgactctctttatactgttgttagtgttggcgtgggaacgagtttttaaaatgggtgaccattggcaattagagcatcgtcttgagccattgcttaccggtatgaaatccttttcgttatggaaaagcctgttgatgacgttagcagtcatgttgatagcatggttactgattgaaatattaaatgattttatgttcggtgttcttgaactggtgttatgggtgttcatttgtttgctgtgcatcggagcggggcgcttacggcatgactatcgtgaatattttcgtactgttcatcaggataatagggaacaacaaagggaatatcttacgcgtctcgcaattattcatggtttaccctctgatgccagcaaagagaatatgttgcgagagatacaaaatgcgttgctatggataaattttcgctattatctggccccgattttttggttgattgtggcgggtaaattaggtcctgttgctttgatgggatatggctttttgagggcttatcagggatggttggcacaatatggtacaccggttcagcgggcgcaatcgggtgttgacagcttgttgcattggttggattgggttcctgctcgtttggctggcgttgcctatgctttattagggcatggtgaacgggctttaccggcgtgggttgcttctcttagtgatttaagaacttcacaatataaagtgctctgtcagcttgctcagttttcattaagtcgtgaaccccatcttgattcaattcaaactcccattgctgcggtgatactggcgaaaaaagtgactttctctgtcatcgttgtcgttgccttactgacaatttatggggcattggtttgatgcgttggcttaatgactctgattggttcgggttttattcatactatatatggagttgtttggcttacctttagctattagagccgatttatgcagcgccgactggcgctgcaacaattgcaacaactaagaagagggttcgatgaagtcaatatccgaccatactgaaataaccgcaacagcttgagctagccctccggcaccgtcagttttcaacagaactggtacaacagaaacttgtgtcgatgccgtgtagttatcgttcctttgtttaacgtatcttgcgttcttgagtgataaggggggggtggccgcatcagtaaacatgaaggcgacatcctctattgaagaggctaaggcattctgtttccccggaacaaatggcccatcgatccggtagagtaagcgtgaattttgaaatacatcatcatcgctggagcaggtgctgtttatccctatttgcctctttgattatcactgtcaggttgcccgcactcccggtggtatagaggtcggtgaaccgaaacggccccggtgctacggtggtttgatacacgatattgccattctagaataccgtcacctgcgcattggagttcgccacaccggttatctccggggcaaaaccgtgctgactgtcgggtaacatcgcctcctccgaagccagtttcatgtcccgaaatgggatactgtaaaaaatatcgccaccggtataggtttcacccgccgtgaactcactgcgcagtgctgggatgtcacgttgcaggtaggtattgttcacctgccattgggtctgtgtcggcgcggaaaaacaggaggcgtcctcgtggcgctgatgattgtaactgtaggtttgcgggctgcgcagacgccacagtcccagattcagcccattacgaaaagaagcaaacagattacgagaacgtgatccttcccagtttccctgattgtcataatgcttttccgagccattgacggtgtagttcatcaaaaaagctgggatctcaggatcccacagtgacgggttaaccgttccagaataacggggctgcatggcgctctgagggacgctgagatcgagacgtaaacggacaaaatccaatgtcacgcgggcgtgcgggatctgtttcgtcagctcggtgatggggctgtcatccgctttaccctgaaaagccggtaactcgcgagtattgaccccatacctttccagttgtgcgacggtgaataccggctggagatggccgttaaccagcctgaattcaatctcgcggctgtccaccttattctggttcatgtagacatccaccagatagcgcccgggtgcgacatatctcgcgttttcatacgccaagagatcgacatgactgtgttcaccatcagcgcccattaggaacatgggattaaagtattcccgcgccgaggcgggcagggtcgttgccgtcagtgaacacagcagacataggtataccggacggggccagaaaccgcctggttgaccgggcgcgtgttggttatcctcccgcagtgcaggcggaaatgaagtttttgttgccatagctcatctctgcttataattcagcctatgctgttgatattaaggtcactctgcctgaataccgtccgccgatgcggcggggttataacgggacgtggcgatcctgactgtccccacaaacgccggggcggttttcgccataatcgccatttttcaggtagctccctagcccgcctcccggtaattgatagcgcaggccaaatcccacgtttcccgccacagtggaagccttatcccgatataatgtcgggtggttttctggtgtggggccggctattttaatggccggtgtacgaccagctctggctgacctcgcacaacctgacaacgctagcgtaataggcttgttgtccgctgcttcgatatgttctgtacttcgttaagcggtatgggtgaagactcgacgtgggatgtctgcacgttgagttcacaggttggctgttccagcgttaatgccagagtcagttctgccgtgtttgaacttgccccgggaagaggacggtacaaagcagaccagcgagtgttgtccgtctgataaaggctcacggttttaacattacggtatctccccctgataggtagatcctcctccaaggtcattaatcaccgtccaactcactttagccgggtaatgcacccctttgaggggtaaaaaaagggtcgagaacggtgagaccatgttctctttctgttgctttgtcatcagctcttgtccgcctactttcagggaggtgaaggtgatgtaatagggtgatggattcgtgatcgttattccctcggctgtcgttttgaagcgcaaagcgccgaagcccttttccggtgcaaccggcagccctgacgggcgatacatcaatttaattgtgttagccagaacttgtacgcccccggagctctgcttactagagagattattggattcggtgcttaacgggatagcttgcgcggtaaaccagaacagggattcccggtcagcaggcagcgcctggccggttttgatgatacgcacctgattctggctgccgggttccatacgaaacagggggggagtcactaaaaatggcgcagtcttgctcccatcagggatagaactgaccgtcacctgcatcagatagacggcctctttactgctattacgtagcaaagcggttgcagcgtagctatccgcccggtagataatgcgggtggcatcaatccccaccctctccgcctgtgtggaagtgatcgggcagcctaacaggccggccatcatcatcgctgtcatcaatcttttcactgagtcacctgaatgtgtctggtttggtgttgcatcagcaagagttggacttctctgtccaattccgctgctatgatgcccttagcacttgatggcgtgtgattatttataaaccacttggaatgttactggtgctattacttcttgggctgctggtacggcgctggacttggaaaccagcgccattttgcattttttcatgccttttccatcttttggactggttggctcgaattctgtggtatcagcgataacaataggagctgccttagtaacagcggtattcccgtcatacacggccacctctacgtcagcattagcattggcgtttaagatctggttgctgttagtaagagtctgttccaaaacctgtatttgaatatcttgtgaaggagtgatttagcattgcttatggtttttcccattttggaactacagttagctagtttaacctctaactcttttcctgatgaatgagcgctattgatgtcagcactaatgtctgacgttctaactgttcccatatctaaagtgtaagcacctttactaccaacaatgcccgtaccttcgacgttgagatcaggggtcgaggcgcctatggaggccatcacgttgaccgtagcgccatctgaagcgtgtgccatacctatctccatgcttaggagtactgcggctaatatgttggtcttcatcatttgctttttcatttcatacattccttatctacatctactgaatacattttgcccaaaacaacaccatgacaggttaaacaatcggaccgccaaggcggtgcgtttactggtcatttagagttattttgttcagttattaacttgatgaaatatatgaatataaatattaaattaatgaaattacttctgacttataccatttagtttcaggatttctgcctttgtcataagaaattgaatataaaatcgatcaaaaaacgatcttgcaacaggtcgcaatatccgtaatgcaagaaataatttcaattttaaatcaaaaaactaggtgattttttacaaaaaaatacaaaaaatctcttttaagtgatgaaattttccgtatactcccccgcgtttgaagaagaccgaacaaaataactctaaatgttcggttttttgtcccatatcagaaactgatgtcattgaaagccacatcactactttgagtaaggtttttcctcgttcttacaccttcttacccttgcgcagaaacacgaatctccagcattgcaaaagcattatattaattattcttattaatttcagtgttgaggggattggttaagacctgatatcaggtttgttttgaaccatcatcttcgattcactctgtattgaaattgaccggcatggtgctggttttgaaaggtgccctgagtaaaccgttctgtgtttgtcatacaatcttcacagcaaactatcgctgtaaaccatgtaatggcgggatgatagaacagtgaccaagtaacatatactgtttgctgtttcagataaatgatgacttttttctttttctatcaataaattaatggtagctttcaatgattatcactctgatttatctatcactttgaaccatattctgtctatttagtgataaaaaattattgtcatacgataacttttaaagtactttagcgaaagtttagttgaacatgtatatggaatgacacaagatgtgtgataaacaggagtttgtaactaatcccagaatcaagctactcagctttctggctattattattgcttccattatggtaattggtgatttggggttccatattgcatcttggtcgttatggcacgataccactcgtcaggccgttcttcaggcgtatagcgatcttatgcctgcattaactgcaaaaggatttaagcaatctttattaagtcaggtgctttatatctctctggatacgatacctcggattatatcaacgtcatcttatatattaattggcattctgtttttccggtttgctaaaggtgaaatatggagtaaccgtaatatttccgcttcatttattattggtttcctgatgattctagagcaacttctctaccctgtgattaatatgttacaaggaatggcgttatctgtggatttagtgaaagggcaacgggtatttagtttttcatttggcgttaattcagaatctctgtttattattatgtttggtgtattccttctgatatttagcttaattatgcgtgaatctaagaagataagcgatgagcaacgttattttatctgagaatcatcatgagtattataataaggttggatgtgatcttagcaaaaaggaaagtaaagtctaaagaactggctgccattattggtattactgagcagaatttatcattgctgaaaaatggcaaaataaaaggtatccgtattgagacgctggaaaaaatttgtaaacatttgcagtgtcaacctggagatatattggaatatgtggaagatggagaggataaccgctaatacaataaataaagtcattgtgtgtcttttggtatcttataagatagaactttatattcattagccagttttaaatgcatgaaaatattaattatttcatgttttttatctagcctgttactctgtggtgttaatggttcaccaataaagcaggtttctcctcgcgataagaatatatatttctctctggggggatattgttctgatattccgtggaatgccagaaagataaaatgcatatgtagatattatttactcgatcataagaaatgatctctctttttatatggttttcatttaagttaaatttttataaaaacagcaattcaaggatgttaacaatgaataaattttttattgttttattctcaatatttgtgattacaggatgttcttctatgccacggcttactgatggctatatttcaacctgtggttattttgaatgtaatgtcaaggatatagtttcaggtagtgaagttaaagtagataatataccttctactcctgatatttaccgggatatctcaatccaagatagacaaattatacaatctggtggaagaccaccttttgaagataagagttacagtattggggggacttttaaattctaatttaatttctttggttatttctttatttttaattaaggtattgttatatgaattttataagaaaaatagctgttatccctttatttaccttatttactctattggcgggttgtacatcgtgggaaaaaccaggggcaactcagtatgaaagagatagggattacgctgaatgtaaagcattaggttattctcaattaccatcagactggaccagcgaagttgttcattctttcgagacaaaacatttttcttgcaaagataaagacaaggacgaagataaatcctgtaatcattacattactgtgccgaaaactgaggttaagcgttgggataaaaatgaatcatcaaggcgttggataatttcatcctgtatgtataaaaaagggtggcatgaagagacgcgttattggttttaatgtagtccatttttttccatcagcaggagttacctggagctgttgctggtggttcctcacatatttgtcattattcctttctaattgccagttttagccctcggttttattgatttgagctacatttataacctgatggtatgcatttgtatttaaaatcaacaggtgatgatttggtcgctatatttttttaataaagattcaactattttcttgctgtaacgattcactgcacctatttatacgttcataaaggttaggttaaaatattatcttaggatgtttattaacctattggttatcaacttttgcgaatttttaaaaaaaactgttaaaatttgcaggtttttatgatttgggacaaggtctttatggacagttggtgaatactttgttacttttatggcccggtagtttaaattggtattaccaattgactttggcaaagaccgaaacaatgtttatccatatatactcaatagatttcaagatggaccgcgacggcaagggagagaatccccgggagcatagataactatgtgaccggggtgagcgaacgcagccaacaaagaggcaacttgaaagatgacggatatatgtagttaccttaagtaggtgctattgatgcaggtggtttgagcattgtccaggttttaaacgacaaacaaaatagcctcatgagacatgagataggttctaactggcttagttctaactgacttatagtaaatatggcttataataaaatccgccaaccaaaattatcagatgttattgagcagcgtcttgaacatctcatccttgaaggatctgtgcgtccaggggagaagttgccgcctgaacgtgagttggcgaaacagtttgatgtgtcacgcccttcactgcgcgaagccattcagcggttagaagctaaaggttttctttttcgccgtcagggtggggggacgtttgttcagagtaacctttggcaaagtttcagtgatccactggtacaactactggctggtcaccctgaatctcaatttgacctccttgaaacccgccatgctttggaaggtgttgctgcctattacgcggcactgcgtggaactgacgaagattttgaacgcattcggcaatatcaccttgttattcaacaagctcaggaaagtggtgatgtcaatgctgaatctgaggctgtgttgcaatatcagcttgtcgttgccgaagcagcgcataatgtggttctccttcatttattacgctgtatggcacctatgctggaacaaaatatccggcagaattttgagtttttgtatacccgccgagaaatgttgacggctgtcagcgatcatcgggcgaagatttttgcagcgataatggcgaggcaaccagagaaagcccgtgaggcctcccatcgccatttagcgtttattgaagatgtcttattggatctcagccgcgagcacactcgccgcgagcgatcattacgatgtcttcaacagcatcaggaataaaattagctgtgtggatcttgaaatttgctgcgtctgcatagctaagttgagtccctttactgagggcactagcggcaacaacagtgagggcctatcttccagtcatgaccggctgaacgtcaaagggtatgacgggaaggtaggctccaaaacaatcattagaaacagataacagataaggaatacaccatgtcagacattttgaaaaatgacgtggatccgatcgaaactcgcgactggttacaggcgatcgaatcggtcatccgtgaagagggtgttgatcgtgcccagttcttgattgatcaggtactgaacgaagcacgtaaaggtggcgtgaatgttgcggccggtgctgctaaccgcgattatatcaacaccattgctgttgaggatgagcctgcttaccctggcaatctggatttggagcgtcgtattcgctctactattcgttggaatgctgtgatgactgtgctacgggcatctaaaaaagatctggaattaggtggtcacatggcttcattccagtcttcagcaaccatgtatgaagtttgtttcaaccatttcttccgtgcccgtaatgaaaatgacggcggtgatttggtttatttccaaggtcatatctctccaggtgtctacgctcgtgctttccttgaaggccgtttaactgaggagcagatgaataatttccgtcaggaaattcatggcaatggtctctcttcttatccgcatccaaaattgatgcctgaattctggcagttcccaactgtttcaatgggattggggccaatcggtgcgatttatcaggctaagttcctgaaatatctggaacaccgtggtctgaaagatacctccaagcagaccgtttatgccttcttgggtgatggtgaaatggatgagccagaatccaaaggtgcgatcactatcgcaacccgcgagaaactggataatttggtatttgttatcaactgtaacctgcaacgtttggatggtccagttacgggtaatggcaaaatcgttaatgagctggaaggcatttttgatggcgcaggttggcaggttattaaagtgctttggggcgatcgttgggatgaactgttgcgtaaagataccagcggtaaattgatccaagtgatgaacgaaacgctagacggtgattaccagacattcaaatccaaagatggcgcttatgtgcgtcagcatttctttggtcgttacccagagaccgctgaattagttaaagatatgaccgatgaccagatttgggcgttgaaccgtggtggtcatgatcctaagaaagtctttgctgctttgaaaaaagcgcaagaaactaccggcaaaccaacggttatcctggctcagaccatcaaaggttacggtatgggtgatacggcggaaggtaaaaacatcgctcatcaggttaagaagatgaatatggaaggcgttcgccatttccgtgatcgttttaatgtacctgtggctgatgatcaactcgaaaagctgccttatgtgacgtttgataaagactctgaagagtacaaatatttgcatgagcatcgtgcagcgctagggggttatctgccaagccgtcgtactcattttgaagagaagctggaactgccaactctggaagattttggtgcgttgctggaagaacagaacaaagagatttctaccactatcgcttttgttcgtgccttgaacgtgatgttgaagaacaaatcaatcaaagatcgtctggtgccaatcattgctgatgaagcgcgtacatttggtatggaaggtctgttccgtcagatcggcatctacagctctaacggccagcagtatactccgcaggaccgtgaacaggttgcttactataaagaagactctaaaggccagattctgcaagaaggcatcaatgaattgggtgccggttcatcatggctggcggcagcaacgtcttacagcaccaataacctgccaatgattccgttctacatctactactctatgttcgggttccaacgtattggcgacctgtgctgggcagcaggtgaccaacaggctcgtggcttcctgattggggggacttccggccgtacaaccttgaatggtgaaggtctgcaacacgaagatggacacagccacattcagtctctgactatccctaactgcatctcttatgatccggcatttgcttatgaagttgctgtgattatgcatgatggtttagagcgtatgtatggtgagaaacaagagaacatttactactacatcaccacgctgaacgaaaactaccacatgccggcgatgccacaaggtgcagaagaaggtatccgtaaaggtatctataagctggaaagcttggaaggcagcaaaggtaaagttcagctattaggttctggttctattctgcgtcatgttcgtgaagcggcacagattctggctaacgattatggtgtgggttctgatgtgtacagcgtgacctcattcactgaactggctcgtgatggtcaggattgtgaacggtggaacatgttgcacccaacagaaacgccacgtgtaccttatgttgctcagatcatgaatgaagcaccagcagtggcttctactgattatatgaagttgttcgcagaacaaattcgtaacttcatccctgcaagtgaattccgcgtattgggtactgacggtttcggtcgttccgatagccgtgaaaacctgcgtcatcattttgaagttgatgcttcttacgtggtagttgctgctttgggtgaattggctaagcgcggcgaaatcgctgtgagtgttgtggaagaagcaatcaacaaatacaacattaacccagaaaaagttaacccgcgtctggcataagaggtaaagaatcaatggctatcaaaattaaggtaccggatatcggtgcggacgaagttgaagtcaccgaaatcatggtgaaagttggcgatacagtggaagctgagcaatcgctgatcaccgtggaaggtgataaggcttcgatggaagttccatccccacaggcgggtgttgttaaagagatcatcattgcggttggcgataaagttgaaaccgacaaactgattatgatttttgattccgcggaaggtgctgtagaagctgcgccagcggaagcgccagcagcggtaacattgtcttcgcgtatggcagagccagaacccgtagcttctgcggctatgaaggttcatgtaccggatatcggcggtgatgaggtcgaagttaccgaagtgatggtgaaagttggcgatgcagtggaagctgaacaatcgttgatcaccgtagagggcgataaagcctctatggaagtccccgcgccattcgccggtatcgttaaagaaattcaaatcaaagccggtgataaagtggaaaccggttctatgatcatggtattcgaagtcgcgggtgcagcacctgttgctccggttgcctctgcgccagctccaactgctgaaccagagaaagcagcagtaccggttattgctagcagaagcttcgcagaagaagacaaaaatgatttcgctgaaaatagcgcttatgttcatgcaacgccggtgatccgtcgcctggcgcgtgaattcggcgttaacctggctaaagtgaaaggtacagggcgtaaaggccgtgttctgcgtgaagatgttcaggcttacgtgaaagacgcggttaaacgtgcagaatcggctcctgcatcagccggtggtggtctgccgggtatgttgccttggccgaaagtggatttcagcaaatttggtgaaattgaagaagttgagctgggtcgtattcagaaaatctctggtgctaacctgagccgtaactgggtggtgatcccacatgttacacagttcgacgaaacggatatcactgaagttgaaaacttccgtaaacagcagaatcaggaagctgagaagaaacagcttggcgtgaagattactccgctagtattcatcataaaagcggtagcaaaagcgctggaagagatgccgcgctttaacagctctatctcggaagatggtcagaaactgacgctgaaaaaatacatcaacattggtgtggcagttgatacacctaatggtctggtggttccagtgttccgtgatgttaataagaagggcatcattgaattgtcccgcgagctgactgagatgtctaagaaagcgcgtgcaggcaaactgaccgcatctgatatgcaggggggatgcttcactatttcaagtctggggggtatcggtggcacagcattcacgccaatcgttaatgcaccagaagtggctatcctgggcgtatcccgctcatcaatgaagccagtatggaatggtaaagagtttgttccacgcctgatgctacctctgtcactctctttcgatcaccgtgtgatcgatggtgctgatggtgcgcgtttcatcacatttattaatcatgcgatgagcgatatccgccgtctggtgatgtaatctcaaaggccggccatgtgccggcctgattgttattgcggtgacagagagacagcttacatctggtgagtttgttgcgagttctgtcacgttaacgcacttttcaggttattaacaattctgtaaactgctcgcggtgtgtaggtcccggtggaatatatcgtttttggcgcctgacccgccggacaaacaattaagaggtcatgatgagtactgaaattaaagcccaagtagtggtacttggggcaggtccagcagggtattctgctgcttttcgttgcgcggatttaggtttagaaaccgttctggtggaacgttactctaccttaggtggtgtttgtcttaacgttggttgtatcccttccaaggcattgctgcatgtagcaaaagtgattgaggaagctaaggcgctggcagatcatggcatcgtttttggtgaacccaaaactgacatcgaaaaagtccgtgtttggaaagaaaaagttattaatcagctaaccggtggtttggctggtatggctaaaggccgcaaagttaaagtggttaatggttttggtaaatttacaggggcgaacacgctggttgttgaaggtgaaggtggcgcaacaacgattaattttgataacgccattattgccgcgggctcccgtcctatccaactgccatttattcctcatgatgacccgcgcgtttgggattctaccgatgctttggcgctgactacggttcctggccgcttgttggtcatgggcggtggtattatcggtctggaaatgggaaccgtttaccacgctctgggctctcagattgatgttgttgaaatgttggatcaggttattcctgcggctgataaagacgtggtgaaagtctttaccaaacgtatcagcaaacaattcaatctgatgctggaaaccaaagttaccgtggtagaagccaaagaagatggtatctacgtcacgatggaaggcaaaaacgcaccagcagaaccacagcgttatgacgcggttctggttgctatcggtcgtgtacctaacggtaaaatgctggatgcaggtaaagccggtgttgacgttgatgaccgcggctttatccatgttgataagcaaatgcgcaccaatgtaccgcacatctttgctattggtgacatcgttggtcagccgatgttggcgcataaaggtgttcatgaaggtcacgttgcggcggaagttatttcgggtaagaaacactactttgatccaaaagtgattccatccattgcttacactgaaccagaagttgcatgggttggcctgactgagaaagaagcgaaagagaaaggcattagctatgaaacggctactttcccgtgggcagcttctggccgcgcaattgcttctgattgtgctgacggtatgaccaaattgattttcgataaagaaagtaatcgtattatcggtggtgcgattgtgggtactaacggtggtgaattgttgggtgaaatcggtctggcaattgaaatgggttgtgatgcggaagatatcgcattgactatccatgctcacccaacgttgcatgagtcggtaggtctggctgctgaagtctttgaaggcagtattactgatttgccaaatgcgaaagcgaagaaaaagaaataatttcttaaatcgatcaatctattaatgtaatttaccgaagcggctttcatttattgaaagccgtttttttatctggtatgacctgtttgaggagactcaatataaaaagtatggtttttgtgggtgctactggcaaaaatcagcggaataatctgttttaatagctttgtctgctgttaattcagaatattactatcagttaatgttacttttctgtgaacgaattaacatcgtattcaaattttggtatgctgagcgcccgaagctgggcataacttgttttgcacttgttaagttatgccggcaatcctctgacctggcacccggaaccataactaacaacctgtttcaggaggggctatttgttgcgaaaacacatattgttacgcaaagataatagcttggtgaggcaggttctaaggcgggtgcagagccgggtagataaaatgacaatgagagcgaggagaaagtcgtgctagaagaataccgcaagcacgtagccgagcgtgcagcccaaggtgtcgtccctaaaccattggacgcgacacaagcggcggcgctggttgagttactgaagagtccaccaaaaggtgaagaagatttcctgttagatttgctgattaaccgtattccccctggcgttgatgaagcggcttatgtaaaagccggttttcttgccgccattgtgaaagatgaaaccatttcaccgctaattacgccagaaaaggcggttgagctgcttggaacgatgcaaggtggttataatattcatcctttgattgatgctttggataatgaaaaactggctccaattgcagctaaagcgctctctcatactttgttgatgtttgataacttctatgatgtagaagaaaaagcaaaagcaggtaatccacaagccaaacaaattatgcaatcttgggctgatgcgcagtggtatctggaacgccctgaattggcagaaaaaattacagtcacggtatttaaagtgacgggtgaaacaaacactgacgacttatctcctgcgcaggatgcatggtcacgccctgatattccgctgcatgctctggcaatgttgaaaaatgctcgcgaagggattgtcccggatcaagctggtgttattggtccaatcaaacagattgaagagctgaataagaaaggctatccgctggcttatgtcggtgatgtggttggtacaggttcttcccgcaaatcggccactaactcagtattatggtttatgggcgacgatattccctttgtgccaaataaacgtggtggcggtgtcgttctgggcggtaaaattgcgccaatcttcttcaatacgatggaagatgccggtgcgctgccaattgagctggatgtgaacaaattaaatatgggggaggtaattgatatctacccatataaaggggaagtacgtcaccacgaaaccaatgagttactggctgaatttgaactgaaaacagatgtattgttggatgaagtgcgtgcgggtggccgtattccactgattatcggccgtggtttgaccagtaaggcgcgtgagtctcttggtttaccccccagtgatgtcttccgtcaggcgaaagcggttgaagaaagtcgtcgcggtttctccttggctcagaaaatggttggtcgggcatgtggcactgtgggtattcgccctggtgaatactgtgaacctaaaatgacctctgttggttctcaggatacaactggcccaatgacccgtgacgaactgaaagatctggcgtgtttgggtttctctgcggatctggtaatgcagtcattctgccatacggcggcttatcctaagccagttgacgtcactactcaccataccttgcctgatttcatcatgaatcgtggcggtgtttctctgcgtccgggtgatggcattattcactcatggctgaaccgtatgctgttgcctgataccgttggtaccggtggtgattctcatacgcgtttcccgattggtatttccttcccggcgggttctggtctggtagcgtttgctgctgcgacgggggtgatgcctttggatatgccagaatcggtgctggttcgttttaaagggcagatgcagcccggtattactctgcgtgatttggttcatgcgattccttactatgcgattcagcaaggtcttctgacggttgaaaagaaaggtaagaaaaacatcttctctggccgtattctcgaaatcgaaggtttgccagatctgaaagttgagcaggcatttgagctggcggatgcttctgcggagcgctctgcggcgggctgtaccattaaattggataaagcaccgattattgaatacctgcaatccaatattgtgctgctgaaatggatgattgccgaaggttatggtgatcgccgtactttagagcgtcgtgtaacgggcatggagaattggctgaaagatcctcaattgttggaagctgatgctgatgcagaatatgccgcagttatcgaaatcgatctggctgaaatcaaacaacctattctgtgtgcaccgaacgatcccgatgatgcccgtttactgtctgatgtggctaacagtaaaatcgatgaggtttttatcggttcttgtatgactaacattggtcatttccgtgcagccggtaaattattggatcaacataaaggtcaattaccaactcgcttgtgggttgctccgccaacgaaaatggatgcagctcaactcacagaggaaggttattacagcatctttggtaagagtggggcacgggttgaaattcctggctgttccttgtgtatgggtaaccaagcccgcgttgctgacggtgtaactgtggtctccacttcgactcgtaacttcccgaatcgtctggggacgggggcgaatgtttacctggcatcggctgaactggcggctgtggcttctttgttgggacgtttacctacaccggaagagtaccagcaatttatggataaagttgatgagactgcggaagatacttaccgttatctcaattttgatcaactgaaccaatacactgaaaaagcggatgatgtgattttccaaaccacggtgtaattgcgataccaatgaatgggaggtaaaaacctcccattttagataatgataaaacgagtgttagttaagaaaattcgttttttgcctgttagtgtggctttaaatactggaaaaaagacaagcatatcatgaaaaaaaataaaaactttaatcattaaaggtaaaaaaacagtgattaaggattttttaaaggaggtaaaaagtttcattctataactgatattaaaagagaaaacattaggaagaacggattttaaattgattgaagtgataaaataacaatattaaccgcattaaaaaattaacaatgaaaaaagaaaaagcgtttagtagtattaaaaaccattaaataaattggattttattttaatgctattaataaacctgttactctttatggttttaagcctaaaaaaataaaaacagaaaaaacctaattatcggcataataaaatcccaaaatacatggttttacagcatacagatcgggttaatttcagtgctattatgttgcatttattatgcaaaatcatgataaattaaatactccttaaatactccttaaatactccttaaatactccttaaatactccggtttaaactggttttatattgttttaacccatccggttgttatatctttttaataattttcaatgatatataccgttatcctccaagttgcctctttgttggctgcactcgctcaccccggtcacatagttacctatgctcgtcgcgatgcatcttgaaatccataaggtataattattgattaaatatttaaattccccatgaaaagatgcgtaattttatttctaccaataatcggcgtacctaattattcttagacgtgccgacaatattcattatgttgaacattgattagcagatggttatttaccataaatgaaaattacacttcataatcaaagacgatgatatcagcgaccgaatctataaggagatcttttaatttatcatgcgctgggtgaggcaaatagtttgcaatagctttatgatcatcaaatgtcatggtgatagcatgtgtaaaaccttttttttgttttcactacttacatgacttccccactcgatagaagaaatgcctttgatctgatgctgcatggaaatagcggtatctcttatcgtcgttaattgttgttgttttatctcggatgtgaattttaacaaaagaatatggcgtatcataatggctcctgaaaggtgtttttgtttttgctgacaagatagaaaataaatttttctattacaagatccttgaatatatctcatcaattagtggatgtgtattcgattttgctgtttttgtttctctgagatattattaattatagtgtatttgcctatatttgcactgaggctggactctcctccgatgaaagccatcgcggacacaaacctcaagaataacttgggggtgtatatttcggttatcccggtgaaaaccatgccgttgtgtcagcatagaggctttaatctcccacttcttggcagtttgtgggctgattttgaggcggaattgccaggaaatattaaaatggaaagaacgcaccagaggtaatgatggaatacgaatttttgctggatgtcactggactggtgactagccggttctcgatggatcacgaagctattggtcagtggctgaatgaagaagttaaaggtgatttggcggtgatagataagattgcctcagcgttggccgaaattaaaggtagtgaacgtcaatggcaacttgtaggtcatgaatatacgctgttaatggatgacgaagaagttatggttcgtgccaatcagcttgagtttgaaactgattcgatggaggagggcatgagttattacgataaggagagcctggctttttgcggtaccaaggattttattgatatgttggccgattatcgggattttattttgcaaaagtacgattggtgagaggctgtatatagacaaaaataattctctggcacgataggtttttttcttactgttatatggttgctatgaaggatagtcatcgagtaattttactcaatggtaggttaaatagttaaagaatcaaggtggttttaaatggaagatatcaatctgtctggtggcattaatgaagctacaagttggcttattaatcatcaggatttaatcattcaatatctggtcaatgctgttgctgctattctcattcttgttctgggattgatggcggcgaaactcattagtaagggtgtaaaaagagttatgtcattgcgtggcattgatgtaacggtatcagatttcctggctgctgttgttcgttatttgattattgcgttcactattattgcagttttgggcaaattaggtgttcagacggcttctgtcattgcggttattggtgcggctggtttagctgttggtttagctttacaaggttctttgtccaattttgccgcaggggtattgttagtggcttttcgtccaattcgtgcgggtgaatatgttattctgggcgcggttgaaggcactgttgttcaagtgcagattttctctactacattgcgtacagcagatgacagaattgtcgtgatcccgaatgggaaaattattgcagataatgttattaataccagccgtgaaccgaatcgtcgaacccagattatggtcggtgtggcgtataatgcggatattgacgaagttaaaaaagtattaggcaatgttattgccgcagacaatcgtattcagcatgaaaaaggcgtgacgattcgtttgcatgaaatggctccctcttcactgaattttattgtgcgtgtatggaccaccaatggtgatgcttgggaggtttattgggatttgatggaggactttaaacgcacattggataaacacaatatcagtattccttatccgcaaatggatgtttatttgcatcagaaccaagctgtgtcgcagaatagggtgagcgattaaagtttgattatcatcacgatcctcttcgcatatattaaggtatcgatgttggcgttattattggcagaattcagtccggttggtgatttattgattttgtgatcgttcagaccggattgagttactgcgaaataatcccttatttttaacaaccatctggttgttttataccctatggatttcaagatggatcgcgacggcaagggagcgaatccccgggagcataggtaactatgtgaccggggtgagtgagcgcagccaacaaagaggcaacttgaaagataacgggtatatctcggtatgatgatattgttgagttaaatagagagactaataacctatcccattaggctgttttatttgccattgtttgcaataattacgcctattagggatagactctgatattgatagttcaataccagtcgtttaaaaaggttctatttcttttgtcatccataatactgtattagaaccatctatttgcaaatcaatgggtttatacccaattttcatataaaatcgcaaaatatattcattgtttttatagagttgtatcgccaagccaacattttttacgttaagtcgttgataacaaatttcttctactttgcgagagagaggaagtactatgccatttctcctccactttggattaacccaaaggtcatggagttcaataattccctgatcattaaatgatgtgcgttcagatattaagagaatatgtgccataccgacaaactctgtattatgactacatagtataactattctctttgattctttaatctcattctggcataacttaaggtattcaataggtcttaattctcctgagttcaccattatatcatgtatatcaacgacttcttcattgctcaattttgattctacaaaagtgaatttattcatttcagttttattaaagttagtgtttttattgttattttccatcataaaactccagaaattgtattaagtagcttgtcagttccgcaacatgctaatatatctgagtacattttattatgtttcctgttacttattctcgtttgtgggcatccaccgtgacataaatgaaaccactggcaatttttcatgttgttattattagtgatttcttctttttctgatttttcataatgtatagaattctctaataatgtttttaagtcattatctagcaatgaaccatagtaaaaattttcgcttccgacgtatttatcacatgcagatacggttgcatttggctcaattgtaacaacttcttgatggcatttttctgaccaataacatgacatcagaacattactagcacctttcaaaacaccaacaaatgagttaaataaaggaatgttaattgtgtctttatattccttccaccaaattagaaatagttccgagagaaagtccatgtattcgaagtaattgacataactgtcacctggagactctcctggaagcaacctgttatctggaacgatatctagaaaaacaagatcattgaggtttattcttgcaaaatagcttaatagttctcttttatttgcttcaagaataagccgatcaacgacaactagccctccatatttaatattgttatttctaaatgtttgtattgttttttctattcttttcgaagtgccaacgccttttagatcaactcttctgctatcattaatttcggggtgaccatcaagacttattccaacactaatattcaatctttttatcaatgctatccatttttcactgatattcacagcatttgtttgtatcgcattggtaacgaattggttatctctcttaatatgttgttgtaaccaaatgaattttatgaaaaattcaggtcttaatcttgtaacttcaccgccatgccatacaaattcaattctaattaaatcaggaatatcgaggatccttttcgtcatagcaactaaactgctaaaactcatggtattatttttcccttcagcccatgaatggcagtaggaacatcttagattgcataatctggtcgctttggtaacaacaacaagtttgttagatcccaacggttttgcttttatttttttctgcatttcattttcataaatttctatttcctcatcagaaaggatatcttggattggaattttctttatatcttcatatgcgtatagttcctgagggattttaggtctttttttagtgtaattagtactcatatcgctatttacatctatatttcttacttctattttttcgttcatcttaacctctcttttaagtgttatttttgtagatggtttttattcaaactgtgtaaagttattaatacgcatatacagtacatcagtattgagaatgtaaaatgataaataaaatagcgttaatgggattaattttaggtataggtactgactaccaatgccgttgtttaagttaaattgttagtgtttagaatctaaaggtccattgagaaagctcaggataattttcgtattctgatttatctctgttatcattaatctctctattatctttatttttactattctcccccggaggggataatttagcatcatgattttttgtagatacgttcatatgcaaccccattttctattggcttgatagtcagtaattaaagagtagttaatgttgtgaataaattccaataatccatggtttttttatggtttttttatcattgtctcattttataaagtaaacggttaagtgtttgcaatctatcgtaacaggttatttttttatgtggttatcattaagaggtttatggcaagattcgatattggtaatatttgattgctgtattaatatgatattaaattgttttagattggtttagtatcttttcagcattgcttcggaaaaaatagttatttatgatagtgagtgcgctagtaataatgattgctaatataattcaatcgataatttatttttcttaatttttacagaattaagggtttattaatgttttgaatgggtattagcttgatttttttgaattaattaaatgattttcctgtaagaatctgatttttggttggttattaaaatttcttatgatcgattagaaacatttatttcctctaatgagctattcttcttaatattctgaacattgaaatagcaaagtgaataattattgaggagtttttttatgttatcgacatttgtgcagggtttttttcttagcgcagcaatgatcttgcctcttggcccacaaaatgcctttgtcatgcagcaaggtagcaggagacaatttcatttgatgagcgcaactttgtgcgcgatcagtgatggttttctgattggtgtcggtgtatttggtggtagtgcattacttagtcagtcaactttactcttgcaatttgtcacctggggaggtgttgcttttttattctggtatggatggggggccttacgtgtggttttgtttgccaatgttgaattggcgcaggtaaataattcagtaaaaaaccgttggcgggtagttgcgatcatctttgcggtcacttggttaaatccgcatgtttatttagataccattgttgttctgggtagtattggtggtcagttatcttcagacctcaggccttggtttacttttggggcggcaagtgcttctgttagttggtttttttctctgtcattgctggctgcatggttttcccctgtgctaagtaagccgctttctcaacggattattaatgggtttatttgtatcataatgtggtatatcgcatggcaacttgctaagcagggattgctaatttctgattaagctgaacacttctttgcatacactctctgtgttagtgttttattcatcccatgtatatttcggtttttccgtgggatgaacattttctgtaacaggttttcttcggaggttgtgtgaaattaaaatcattggggttggccgccatgttaagtgccggggtgccacttgctgcacaggctgctgatttacccggagtccctcatgttattacttctggtaatgcggtagtgaaagcagaaccggatatagcaacattgctgattaacgtcaatattgcggctaaagatgcttctggggctaaaaagcaggttgatgaactggttgctaagtattttgattttctgaaaaatcacggtattgaaaagaaagatattgatgccgcgaatttgcgtactcagcctgattatgagtacgataatgtatcgggcaaatcggtgctgaaaggctatcgtgcgatccgttcagtggaggtgaaggttcgtaagttagatcaacttaatgatctgctagatggtgcattaaaagcgggtttgaatgaaatcgtatctgttcagtttggtgtggacaatccgcaaaaatatcgtgatgaagcccgccagaaagcgattgagaatgcaattgaacaagctggtgccttggcgaaaggctttaatagcaaagttggctcgatatacagtatcaattaccgagcaccagaggtgattgatcacatgaagtatcgcaatactgatgtgatgatgtcgggaggtgctgctgctggagtgggtgaaacttaccagcaggatagcatcaacttcagcgatcaggttgatgtggtttttgagctcaaaccttaattaatatcatcttgtcttaacatctgacgcccaagtttcaacagggcgtcagtcacttttttcatagtcctgctttccggtgcaaaacgatgccagtagagcatccggcgctgacataaacccggtgtcaggtcgatcagttcaccatttttcaattcttgatcaatctgcaaatgtgggatcatacaacaagtggaaccctgttttgccagttgtacaaaggcttcagatgagttgacgatatgacatggaacgctacccggtgataattcgaagttctgttgtaaaaatgcctgatgcatatcatccagatggtcgaatgcaactgctggggcttttagtaacgccgaacgggtaaccccatttgggaaatggcgggtcgcaaattctggtgaggcgacaaacagataatccagtgcgcctagtttatcaatcagacaactgggtaaaggctgtggttgaatactgactgcgccaacgacttcacctcttcttagctgttcttgagtccgagtttcatcttcaacttgaatattgagtcggataggtaaatcagcgagtaccggatgtagagctggtaacagccaggttgctaagctgtcagcgttgacggctaatgaaagcagcaatggagtatcggtcccctgttcattgcctagccattgttcttccaacaactctacctgatgcaatagtgccagtagtttttgtccttgttcggtagggcgtggaggaacggtgcgtaccaatagaggctgaccgaacagattttccaactgtttgatacgttgagaaactgcggattgagtgatacagagtttctgggcagcgcgctcgaagccgcgttctcggatcactgcatccagggcttgtagtgttcggtagtcagggcgtttcattatagaaagattctccatttatttttctgaatatcactatgccatatttttctgatgtatgaggcaatttatctggtgggccgtaaaatcctacttttcagaaatcaagcatgttatacccaatttggataaatttttgttggttggtcgcctttgggaagggggttccatttttgaaggttgagtttgttgacgtggttgaataggcgatatgctcaggagaaagcactgggtgaagctgtttttgatagcttaatgatgaatttttgatcgagctaaaggtggtttgcatgtttcgcttaagtgtagtctttcaataaagttgttaaaaaatcgttatttttggctatttaataacaatataagtaaggttgctttttatgctgtcactgaaacatgttgcacaattaacgtataatactttgcagttatatatggatcagagaggaatagatttggcggttggtcctatctctgacagcgatgcaaacatgctaacaaaagcgtatggtgagcttaactgggaatattatattacagaagtcggtaatcgacatgactgcttcagcttatgcataaaatttgtcgtatcaagggaaaatctccaaattgaatctgctccggctggagtcgctttatcgacatatgatttgaacgataaaagttttaacatccatgtattggaaaattttgtgaaggatatggaaaatcatccgttgcatagaaagatgcttttgtatactctgtatgcaactttgattttcatgaatgtggctgatggtgaagacgtcaggattcatgaacccgttaaggataaaatagcttactatcgctcgtttggttttgagctagagcgttgtgggtatgtcatgtcatgtgatattaagacattaacggcaaagttgaagagtaggtctaaggcgttagttctttgacatctctgcatttatatgcgtgttatataccttatggatttcaagatggatcgcgacggcaagggagtgaatccccgggagcataggtaacgatgaccggggtgagcgagtgcagccaacaaagaggcaacttgaaagataacgggtatagtatcttggtagaccaggtgggataattattttgttcatttagatttgttgaaggtgaaatcttactaaatttgttgcatggccataacagagagattttgtcgggaattttttgtcctgtatgactaaatcagttcagtaatgtgaagttgttttagaggtgttgctatgagaacacaaaaagaaccgatgttcgatactattcaaacttataaaaaagctggagagaccttagattttcttatgaaagtaggtccggttttagaagatcatgcacaggcaccaagtcaagaaaagcaaggtcgtcgtcgtaacaaagaggctgcatagacatcactctttttgtagcccgctagtatggcgggtttttcacattatttagtcttaattttccatgattcatctcactcaacttatacctaatggatttcaagacgcatcgcgacggcaagggagcgaatccccgggagcatagaaaactatgtgaccggggtgagtgagtgcagccaacaaagaggcaacttgaaagataacgggtataattgcggtttctttgttgctatcaaggtttatactagtcgacaggctttccttgtaactgataataggcaatgaattgatatgactcaggacgaactaaaaaaagcagtaggttgggcagcactcgaatttgttacaccaggaacagttgtgggtgtggggacaggctcaacggcttcacactttattgatgccctcggttccattaaagatcagattgaaggggcagtatccagctctgaggcttctactgagaagttaaaaagtttggggattcctgtattcgattgtaatgaagtcgattcccttgatatctacgttgatggcgcggatgaaatcaatggcaatatgcagatgattaaaggcggtggtgctgcattgacgcgtgaaaaaatcattgctgcaatagcaaaaaaattcgtttgtattgttgatgcttctaaaaaagttgaggtattgggtaaattccctctgccggttgaggtgattccaatggctcgggcttatgttgctcgtgagttggttaaattggggggagtaccaaaatatcgtcagaatgttgtgactgataacggcaatgtgattcttgatgtgcataatctagccatactcgatcctgctgagttagagaataaaattaatcgtatctcaggtgtggtgactgtgggcctatttgctaaccgtggtgcggatattgtattgatgggaacacttgatggagtggaaaccatcactcaataatattatttacaggggcggaatttttcgcccttaaaaattttttcacttttagaataggtggagaatttagtgatatatttcatatctctgattgttatttgatctaaatcctaattttgttctttttcagatcattttattcctcataataactactttattaagacttatgtgatgggaatagcaatcgtttatattgctgtgttcgttttttttgttatgttgagagaatgaatcttaaatgtaacgaagcgtaacaataggcaggataaatggttaaggtatctctggaaaaagataagattaaatttttgctattagaaggtgtacatcagagcacggtagaaaatctacgagcagccggttatagcaatatcgaatatcataagggagcattagatcccaaagagttaaaagaggcaattcgtgatacccattttgttggtatccgttcccgcacacaactgaccgaagacatttttcaggcggccgaaaaattggttgctgtaggctgtttttgcattggtaccaatcaggttgatctgaaagcggctgcaaaacgtggtatccctgtctttaatgcgccattttctaatacccgttctgttgctgaaatggtccttggtgagctgttgttattgctgcgtcgtatccctttggcgaatgcgaaagctcatcgtggcgtgtgggataagcaggctaaaggctgctatgaagttcgtggtaaaaaactgggcattatcggttacggtcatattggcactcagcttggtattctggctgaaaatattggtatggatgtctacttttacgatattgaaaacaaattgccgttaggtaacgctcatcaggtacgtcacttgtcagaattactgaatatgagtgatgtggttagtttgcatgtaccagaaacgccatcaactaaaaatatgattggtgcaactgaactgaccctgatgaaaccgggttctatcctgattaatgcttcacgcggaacggtggtggatatcccggcattatgtgatgcattggaaagtgaacatctgtcaggggcggctgtggatgtgttccctgttgaaccggcaaccaataatgatccatttgagtcaccgttacgtaaatttgataacgtgttgctgaccccacatattggtggttctacccaagaagcgcaggaaaacattggttatgaagtcgcaggaaagttagcgaaatactctgataatggttctaccttatcagcagtaaacttcccagaagtgtctcttcctgttcatgctgatgataccaaccggtttctacatattcatgaaaatcgcccgggtatattgaacagtattaaccaggtgtttgctgaacaggatatcaatattgccgctcagtatctgcgtaccagtggggacatgggttatgtggtgattgatattgtgactgaaaatccggctcaagctgaaatggtatttcagaaactgaaagcattgccgggtactatccgttctcgtctgctttactgagtattttgatatgtcaaaaatgggtgctttgtgtaaggcacccattttttactgccattgccagattttttcaggtgtgatgatttcgggtaatgggatatcccattcggctatgggcagtgtatcgactaactgacagttatgcgccagacctatcgggtagaaatttttttgttgccattgcctcaatgtacgatcgtaaaagccaccacccatgccaagccgttgtcctgtgcggtcaaaagcaaccagcgggatcatcatgatatccaactctgattacggtaaaacctgctcaacattcagcggtgggctctctatattgaagcgatttctgacaagccgactattgggttgatagtttaaaaataacagatggtgatgacggaaagggtgcaataccggcagatagatctgtttattttgttgccagagttggttaatcagtggacgggtatcgagttcaccatcaaacgaaaggaatagcgcgattttgttggcttggtgaattttggggtggttgattgctcgctcagcagcctgtcttgcaaaaagagattgttgttcagaagtgagttcacggcgttgttggcgtattttctttctaatgctttgtctgagtgataataggtgctctgattgcatagaacttgccagtggatagcagcagcgattaaggttgagattctccaagatgccgttacaggtagtaacccttgaaccctcggttcaaggtgaacgcagcgtcgcagctttaaggcttctcggctggaccgagcatgcacaccagactacggagcaccacattctataatgtatgaaatatcggctcaggggactttccccgttaacgaacatctcagagaaatttattcagcgcttgtaagcaactttatgacacctattgtatgaaactaaacacagaaagcaactaattctcgaatgattcactcactaatgcatgatttatcaatagaattcattcatttgatgaaatagtactctcagtgatgcgaccttgttccactaatgcttgttctatagtctgttgaagcatctttattttctgttccatattataggcatagtcacgggttttcactttttcttgtgccaattcgtgacagatattcagtgctacaataaaaatcagttgttcagtattggttactctggtgcgctcttttaaatcgtctaaacgttgctcaagttccacagccgcagccagcaatgcttctttttgctctgatggacaattgacacgtagtgaccgcccaaaaatgtggatatctactggttgtgcagacatgaccccttcctgacttattgctgcgtcccggttttaattctgaattatagaagaattgaaaccggcgccaatcattataacgccataccgacagacaactcacgattacctaaggttgttgtctggtatagcgactccccttggtggtagcatagcatgaacttacaccgtcaacgatgaccaatacacatgtctatacagaattcattaccagattatcaatcttttgacgaaacattgcatcaacagtcagtggcactgacggcagcggagatgcatgggttgattagcggcctgctgtgcggcggtaatcgcgacagtagttggcaggtcttagttcatgacttagcgaatgatgggttagctttttctcatccattagcccaaaaattgcgtgaattacgtgaaatcacattcgaatcattggatgacagtaattttgcattcggtttattgctgccagatgaggaagataatgtatttgaacgagcagatgcattagctggatgggttaaccattttttgctgggattaggggttgctcaaccgaagttcgcggatagaaaagagattagtgagattattggtgatttgcgcaatatcggtctgcttggttatgaagaaggtgatgatcaagaagagttgtcccaagcactggaagaggtccttgaatatgtgcaagtggccgcacagctttgctatatcgcctttactgaacctaaaaccgttttaatcgccaaaaatgataaaccaacattgcattaattggtgtttattgaacgcaaaataattataagtcgcaggagagggtatgatcaaacaagaatatttatcccgccgtcaggctttactggcaaaaatggctccggccagcgcagcgattattttttcttctccgcctgcgccacgaaattcagataatgaatatccctatcgtcagcatagcgatttcctttatttgactgggtttaatgaaccggaagcggtgctgatattaattaagagtgatgatacgcataatcatagtgtgctttttaatcgagcgagtgacttgactgcggaaatttggtttggtcgtcgtcttgggcaagaagcggcaccggaaaaactgggtattgatcgcgctttgccttttgatgatatcaaagaagagctttacctgttgctgaatggtttgaatgtggtttatcacgcgcaaggtgaatttgcctacgcagatgaaattgtctttcatgcgttggatatattaagaaaaggcggtcgccgtaatctttcagcgcctttatcgataactgattggcgcccttgggtacatgaaatgcggttgttcaaatctaaggcagaaattgaggctatgcgccgggcaggtaaaatcagtgctcaggcccataggcgcgcgatgaaagtttgccgcccaggaatgtttgagtatcaactggaagctgaaattcatcacgaatttacacatcaaggggctcgctatcctgcttacaacacgattgttgggagcggtgaaaatagctgtattctgcactacaccgagaatgaaagcaggatgaaagagggtgacttggtgttggttgacgcaggttgtgaatatctggggtatgccggagatatcacccgtactttccctgtcaatggcaagtttactcgtgctcagcgtgaaatttacgatatcgtactgaaaacgttaaatgtttcgttggaattgtataagccaggtaccagcatcaacaaggtcacagaacatgtggtgcggattatggtggaagagttggtgaaactgggcattatgcacggtgaagttgagcatttaatcgaaaccaaagcctatcgccaattctttatgcatggcctcggtcattggttaggattggatgtgcacgatgtcggtgactatggcgtagagcgcgaccgtattttgcaaccaggaatggtattgacggttgaaccggggctgtatattgcaccagatgccgatgtaccgatggaatatcggggtatcggtatccgtattgaagatgacattttgatcactgaaacaggtaatgaaaacctgacagccagtgtcactaaagaagctgatgagattgaagctctgatggcggaagcaaaacagggttaagttaagaatgaacgtgattatcgttggtggaggcatgaccggcgcgacgcttgcgctggcgatatcttccctgagtaaggggcagatccatgtgtccctgattgaagcagcagagccggagcagaaacatcccggctttgatgccagagcgatagcgctggcttacggtacttgtcagcgtttacaacagattggtgtttggtctgctctggaagattatgtgataccaataactcacgttcatgttagtgatcgtggtcatgcagggtttgtgaatctttatgcaaaagaatataacattccagcgctaggtaatgttattgaattgtatgatgcagggcagggtttgttcggattgctgaaaaatgcgcctggtgtaacgctatattgtccatccaaggttatggctgttgaaagaactttgtcatcggttgctgtcattttggacagtggcgaacgattgcaaggtgaattgctggtagcagcagatggcagtcattctgccattggtcacgcttgtaatattcagtggcagcggcatgcttatgagcaggttgccgtgattactaatgtactgacttcagagcatccgcgaggtagggcatttgaacgtttcaccgaatatggcccacttgctttgctgccaatgtctgaggggcggagctcgctggtatggtgccatcagttggcgcggagaaaggagatagcgggttggaataatgagcaatttcttaggcagttacagcaagcatttggctggagactggggaaaatattggaaaccggccagcgttatcgctatccattgacactatctactgcaaatcaacaaattagccaccgattggcgctggtgggaaatgctgcacaaacattacatccgattgcgggtcagggctttaatcttggtatgcgagatgttatgacactggctcagattgtttctgaggcttttgctgctggtcaggatattggtgcttaccaggtcctggctaactatcaacagcaacgggttttagatcgggaaaacaccattgatattaccgatggattgatacgggtatttgccaatcgttattttccattacaaatcgggcgtaactttggcctgatgatgatggaaaaatgccctcctatgcgggatatactggcccgtcagactctaggttgggtcgcccaaagataaccgcagataaagcagacaaaataagaggacgttatattatgcaatcatttgatgtggttatcgctggtggcggtatggttggtttagcgcttgcctgtggcttacaaggcagtggcttgcgagtggctgtggtggagagctatccgccgactcaatccgttgttgctggagaagagtacactttgcgggtttctgcgattaatgcagctagtgagcgcttattgcagcatcttggtgtgtggcaagatattttggatatgcgcaccagtccttatcaggaaattgaggtttgggagcgggatagctttggccgtattcggttcagtgcggctgaatatgggctggaatatcttggtcatatcattgaaaaccgagttatccgtgaaacattatggaaaaaagtagatagcttatctgacgtgaccattttggcacccgcggctttgaaacaggtagcttggggtgaaaatgaaacttttatgactttatccgatggtcgcatgttaactgctcgtttagttgttggtgctgatggtgctcattcatggttgcgtcaacatgctgatatccctctcacattctgggattatgaacatcatgcattggtagccactattcgcaccgaagagccgcacggctgggttgctcgtcaggtcttttatggtgagggtattttggcgtttttgccgcttgccgatccccatttatgttctatcgtctggtcactaccgggtgaagtcgcagaacagtacaaacagcttgatcataggcgtttcaaccagcaattggcggtagactttgatctgcgccttggtcaatgtgaactgatgagtgagcgtctgacgattccactgacgggtcgttatgcccgtaattttgcggctcatcgtctggccttgttgggagatgccgcccatactattcacccattggcaggccaaggtgtgaatttgggctttatggatgtcgctgagctgataggtgaattgcgtcgtttgcatggtcagggaaaagatattggtcagcacttttatttacgtcgttatgagcgccgacgtaaacatggtgctgctgtgatgctggccgggatgcaaggttttcgtcaattatttgatggcaataatccggcgaaaaaacttttgcgggatgtcgggttgtctctggcagataatttaccgggaattaaacctaaattacttcgtcaggcaatgggattgaatgacttgccgaattggctctgttcggctgaaaaaatctaatttagcctctgcttatcgataactttttctcataccttgctgaaatatgaataggtgattttattcatatttcagttagcttgtaacagaaaatgggtgttttctaaagttaattgttaattttgagtattatgactcattttaatagttgaaaattctgcatactcacaacacgttttttgatggtcactggattgaaccctatttttacttatggttcattttggttttcagtgataactttcattttaagatatcgtttgcgtcgcgttttttagccgctttttgttcatgattcacagtatctgtcggttaatacgcggtatgttttcatgtaggaaatgaaaagagggaaataatggcaaaacaaaccccattgtatgaccagcatctggcttgtggtgcacgtatggtagattttcatggctggatgatgcctttgcattatggttcacaaatggatgaacatcacattgtccgcactcatgctggtatgtttgatgtttcccacatgacgattgtggatctgcatggtactggttgccgtgatttcctgcgttatttgttggcaaatgacattgctaaactgacagaaaagggtaaagccttatacaccgggatgcttaatgcttctggtggtgtaattgatgacctgattgtttattaccttagcaatgatttttatcggttggtggtcaattctgcgactcgtgagaaagatctggcttggattaatgaacatgtcgccaattacccggttgatattcaggttcgtgatgatctggcattgattgcggttcaggggcctgacgctcaggcaaaagtagagtctctattgaatgatgaacaaaaacagactattgccggaatgaaacctttctttggtgttcaggcgggggatctgtttatcgcaacaacgggttataccggtgaggcgggttatgaagtggcattaccaaaagagcaagcagccgatttctggcaaaaattgctgagtgtcggcgttaagcctgcgggattaggtgcgcgtgatacgctgcgacttgaagccggtatgaacctctatggacaggaaatggatgaaaccatttctccccttgtggctaacatgggttggacaatcgcttggaaacccgaagatcgccagtttatcggccgtgaagcgctagaaaaacagcgtgaagagggcactgaacaagttggttggtttggtgatgagagaaaagggtgtgttacgcggtggtttagcggttagttttactgatgagatgggcaccttacattctggcgttattaccagtggtacgttctctccaacattaggattcagtattgcccttgcccgtgtgccgcaaggaattggtgaacaggcggttgtccaaatccgcaatcgtgaaatgccggttcaggtagtcaaacccagctttgtacgggcgggcaaacctctcgtatagtcatttttatcgaataataacttgatgagtaaatagtcatttatcccggtaagcataattggtgcaggagcacaaaatagcctaataggggtagattctaggattgaaggagatgatggtaatgagtaatgtacccgcagagttaaaatatgttgaatcacatgagtgggttcgtgcagaaggtaatgatgaatacacggtaggtattaccgagcatgcacaggagctgctcggtgatatggtttttgttgatttgccggaagtaggtgatcaaatcaatcttggtgatgattgtgcggttgttgaatcagtaaaagcggcttctgatatctatgcaccactgagtggtaaaattattgccgttaatgacgcgctaaatgacgcgcctgaactggttaacagtgagccttatcatgaaggctggctgttccgtattaaagcctctgataaaagtgaactttcgagtttgctgaatgccgaaggatatcaggcacttctggacgaagaagaataatatacttaccgtcgccctgtttcacattgtgagcagggcgtttttatttgtatgccatttctggccagcttcaggaattagtcacaaatgacccagacattaagccaactcgaaaatcagggcgagtttatccgccgtcatattggctcttccgccgaacagcaaaaagagatgttggcgacagtgggggcaagttcccttaatgatttaacacagaaaattgttcctcgtgatatcgcgttgccagagccgcccgatgttggtggcggtgcaactgaacagcaagcactagctgaattgaaagcgattgccagccaaaataaacgttaccaatcctatattggcatggggtatgcgcctgcggtgcttccgccagttattttgcgtaatttattagaaaatcctggctggtataccgcttatacaccttatcaacccgaagtttctcaaggtcgccttgaatcactgttaaatttccaacaagtgacgatcgatttgacggggttggatattgcttctgcttctttgctggatgaagccaccgcggcggctgaagcaatggcaatggcaaaacgtatcagcaaactgaaaaatgctgaccgtttctttgttgctgatgatatccatcctcaaacattagatgttgttcgtacccgcgcggaaacctttggctttgatgtgattgtggataaagcagaaaaagtcttggagctggacggtgtatttggtgtgttgttacaacaggttggcacgacaggtgaagttcatgattatgcggatctgatcgcacaactgaaacagcgcaaaatcattgtcagtgttgccgctgatttgatggcgttgctgctgctgactgcaccgggtaaacaaggcgctgacatggtgtttggttcagctcagcgttttggggtaccaatgggatatggcggtccccacgccgcattttttgccagccgtgatgaattcaaacgttctatgccgggacgtattatcggtgtttcccgagatgcggcaggtaatacggcactgcgcatggcaatgcagacccgtgagcagcatatccgtcgtgagaaagcgaattccaacatctgtacggctcaggtgttgctggcaaatatcgcggcgatgtatgcggtatatcatggttcgaaggggctgaaacgcattgcaggtcgtattcatcgtctgactgacattctggcggttgggttacagaaagctgggtttactctacgttacaaaacttggtttgatacgctgacggttgaagttgctgataaagcggcggtattagcccgggcagagaaagctgaaatcaatttgcgtaccgatacttacggcgcggtggggatcacattgagtgaagctacccgccgtgatgatgtgatcaaattgttctctgtgctgacaggcacggatgacaagctagatgttgaagcactggataaagagctgatgacggaaagtcactccattcctgcctcaatgttgcgtagtgatgaaatcctgctgcatccaaatttcaaccgttatcacagcgaaacggatatgatgcgttatatgcatcgtcttgagcgccgagatttggcactgaatcaggccatgatcccattgggttcttgcaccatgaaacttaatgccgcggcagaaatgttgccgatctcttggcctgaatttaatgaactacacccattttgtccgccagagcaagcgcagggttatcagcaaatgatcagccaattatctcactggctggtgcaactgacaggttacgatgtcgtttgtatgcaaccaaactccggtgcacagggtgaatatgcgggtctgcttgctattcgccgttaccatgaaagtcgtggagaagggcatcgtcatatctgtttgatccccagttctgctcatggtaccaacccggcatctgctcatatggcaggcatgaccgttgtggtggtgagttgcgataaagagggcaacattgatctagttgacctgcgtgaaaaagcggaagaatcaggtaatgagctttcctgcatcatggtgacttacccatcgacccacggcgtatatgaagaaactattcgtcaggtgtgtgaaatcattcaccagtatggtggtcaggtttaccttgatggtgcgaatatgaatgcgcaggttggtatcaccgcgcccggttttatcggagctgatgtttcgcacctcaacctgcataaaacattctgtatcccacacggcggtggtggcccaggtatggggccgattggcgtaaaagcccatttggccccgttcttaccgggacactcggtagttcaaatggatggccttactgaacagagagctgtctcagcggcaccatttggtagtgcttctattttgccgattagctggatgtatatccgtatgatgggctcgcaagggttgaagcaggcaagccagacggcgattttgaatgctaactatattgctgctcgcttaaagaatgattatgacgtgttgtatacgggtcataacggttatgtggcacatgaatgtattctggatattcgaccgttgaaagaagagtttggtatcagtgagatggatattgccaagcgcttgattgactatggcttccatgcgccaaccatgtcattcccggttgccggcacgctgatggtggaacccacggaatcagaaagcaaagtggaaattgatcgctttgtggatgccatgctggcgatccgtgctgaaattggcaaagtggcaaaaggtgagtggtcattagaagataacccattggttaacgcgcctcacgtacaagctgaactggtttctgactggagccatagttacagccgtgaaactgcggttttcccaaccttggaaaccaaagccaataaatattggcctgcggttaaacgccttgatgatgtttacggtgatcgtaatctgcattgctcttgtgcacctgtcagtgattatcaataatcactcataaaatagccaacgccagcataataactggcgttgctattatttatatttattggcgaagtcgatttaaatatataccctctggatttcaagatggatcgcgacggcaagggagagaatccccgggagcatagataacgatgtgaccggggtgagcgagtgcagccaacaaagaggcaacttgaaagatgacgggtataaaattaatttatatatttaatacctttttctcccaagctttacatgctatttctaatctaacagcatctttcattattgttatttttatttaataaaatgtttttattgatattttatttaaataagtttttatgggtaatgatatttcattaatataaaattgaaactattattaatataataatttattattattgtatgatattcacaatccttagtcttttccttctactccgtcaccatttaatatctccagccttatcgcgattttctggcatttaatatatcagattcgccattagcaggattaaaaacccagacgctgatcacatttcgtactgatgatttagacaagcaaataattaaacattagaatagttttattatgccactatcaaattatcaatattttctatggaaagattatcgctttatcgccgcagcttggcagtacttatcctgcgggcaacatccgaatggacatatgtttcaacatcgggtgcattgggatctatttgtcacattatgcaccggattgaatttgcaggggcagaaagtttgtcccggtcagaccaagaacactcgatgcattcttatttatccgcgggtttaactttgcaggatatcaacgcacgggtacgaaaaaccgctaatacctcattgggtaatttattagtcagcatgactgactttgtcacacttaaattaggaaaagggacagtacgatggataaacgccacaactcgatggctagggtcacaagttatcttttaatttacctgacggcaatccagccattgcacccggctatggctatcggcataacaccggataacaaccgcacacaggtacaaaatcagggcaatgtaccggtggtgaatatcgccacgccgaatgatgcagggatatcccacaacacctatcaagagttcaatgttgccactcagggggccgtacttaataacgcgacacaggcggctcaatcacaactggcagggcaacttaacgcgaaccctaacctgaaaggcaaagcagcggaactgattattaacgaagtcaccggcagtggccgctctgacctgcaaggccagttggaaattgttggcaataaagccaacgtgatgattgccaaccctaacggcattacctgcgatggttgtggttttattaataccgccagcgcaaccctgaccaccggtaaaccccaatttgataaacagggtgcgttggaagcactggaagtgaaaaaaggccagattaccattggcggcaaagggctggacggcaagacgacggattatgtcgatatcatcagccgggcggcggagttgaatggaaaaattcaggctaacactctgtcgctgactcagggggccaaccgtgtcagcttgaaagacggcacggttaaacctatcgccggagaaggggcaaaaccgcaattagcggttgatactaaagccttaggcggcatgtatgccaataaaatccgactggttgccactgaagacggggttggggttaatctcaccaacctgaccacaacccaagacgctatcagtttaaccgctgagggtaaaattatcttgggggaggtacaagctaagaccgatatcaacatcaacagtaaagccattgaaacggcggcacaaagccatgtgcaggcgggtcaacatctgaaattgaccaccgaaacactgaggaatcaaggccaaatccgggcggatggtgatgtcacgattaaagcgactcaacttgataacgtaaacccgactaagcaaagccacccgattattaccgcgggtaaaaacaacagcattaccgcgaacgagataaataatgttggtgagttaagcgcgggacaaaatctcaccctgacaggcaaaaatttttcaaccaaagcgataaaagacaatcagcagaatatcattggtaaactgagtgccggtggggatttgacggctgtctttaaagagggatttagttttgattttaataaagaacattttaaagcgggaaagaaacctacggatctggcgttaatcaccgggaaaaacatttctctcactgcccgagatttagcaaatcgtgcgtcaatgagggcagaacaaaacttagccgttgacgcagaaacaatctatttaggccaggggaatttaaaagccgggaaccatgtcatgctggatggaaaatcacatcttgatgtgaatggttatgatatctccggtcgggatgtgaccttgcttgccagccgggggctgctgtctgttgtctctggagatgactatacccctgagggaataagggtattaaccacgctttctgctgataacatattacgcattatcgccgagggtcctattaatatcgccgatactctgattaaccgggcgaaaaatatctttttggcaaccaatgataagcttgagatttatgcctctggtgatttaattgatgagcagagttcactcaatgacggcgctaaacaagcattcattaatcagcgtctgcgccagctcagccaattgcaagcggatgaaaatattgagatccatgcaggaaagattgtcgatctgagaagcatttccttgacggcggggaaagatatcacgctgaccagtggcggcacgcttgatgtgagtaaaatcacagcagaggacccctatgaatatgaagatgaacacggaacgggttatgaaaagcattatgaatatgaaaatgctgatgacgaggaagacgaacaatcttacccacaatttcaattacccatagcgagcagtatcatcactgccggcaataatttaacccttaatgctggtggtgacattattgatactgaggcaactttgtcggcaaaaggggtgactgccattgtcaaaaacaacgcagagttacattcaccgtcagggaggtataactcagttgaagggaaatatacgccagtcacttctgcgctgattgcatgtgcgttaagccatgctcctcaactgaccataaacgcctcagaagtagaaggagaagtcccagggattaaactggcggataagcaaactcggatcacctcgaaaaacaatcaccctattattcatattgcggcacctaacgcccgtggtgtttcacataaccgttatcaggagtttaatgttggggcttccgggctggtgctcaataatgctaccgaagctacccaatccgtactggcgggacaaattggggcgaaccctcacttcaacggtcaatcggctgaactgattattaatgaagtggtgggtaccttagcctcaaatctgcaagggctgttggaagttgcagggcagaaagctaatgtcttcattgttaacccgaacggtatgacctgtaatggttgtcgctttgttaatactccggctgtcaccttatcgaccggtaaaccggtatttgataaagatggcgcattagcggccttggaagtgaaaaaaggcgctatcaccttgggtgaaaagggactggatgcaacagcgcaagattcgatcgctatcatcagccggaccactaagcttaacggtaaactccaggcgaaaagcctgacattgacacaaggccccaaccagattgatttcaaacgcggaacccttgttcccatgacaggggaagattatggcccttgggaagcgattgataccgggttattagggggaatgtatgccaataaaatccgtctggtgagtaccgagccgggtaaggttgtcaatctgaccaacctgacggcaacccaaggcgacatcagtctgacggcggatggcaaggtgactctgggggatgtacaggccaaaacggatatcaccgttaacggtaaagacattgacatggtgaaaaaaagtcatatgcaagccggtcaacatctgatattgacaaccgatacattgcagagttggggacgaattcgtgccgacggtgatgtcactattaaagcgaaaaccttgtctttagatgggggaaatatcaccgccgggaaccaggttctgctacagggaaagaacagttttacggtgcgtggcacggatatttcaggtcatgacattaccttgattgccaatagttataatacttctgtttcacctagtgacacgtcggaaagcacacaagtattacctattatttctgcggttaatacgctgcgtattctgtctgaacagggaatatcgctttcagatacgctaattaaccgggcgaaaaatatctttatggcgagtaatgggtggattggtattaatcagcatttggcggcggatgagaatattgatcttcacgctggaggggggataaagttggatgggatttccctgaccgccgggaaagatattaccctgaccagtggtggctcgattaatattggcaaggtcaccgctggcaacaatttagcgctgattgccgacagcaatataacagagacagcattatcggcagaagggacggccgcagtcgcccaatatagtaccgcgttgcacttagccgacgggagatatactccggtgacttcggcgttgattgacctcgcattagataatgccccccaactgaccatcaatatcccagaaatagctggtggaatacccgggattcaactggcggataagcgagcgcggattgctgtgagaaataacctgcctattatccatattgcggcaccgaattcccggggtgtttcacataaccgttatcgggagtttaatgttggggcttccgggctggtgctcaataatgctaccgaagctacccaatccgtactggcgggacaaattggggcgaaccctcacttcaacggtcaatcggctgagttgattattaatgaagtggtggggactttagcctcaaatctacagggtctgttggaagtggtggggcaaaaagccccggtcttcatcgctaacccgaacggcataacctgtcatggttgtggttttatcaataccccggctgtcaccttatcgaccgggaaaccggtatttgataaagagggcgcgttagcggctttagagatgaaaaaaggtgtcataacctttgatgaaaaggggctggacgcaacggcgcaggatgctgtcgacattatcagccgtgcgacgatacttaacggcaaagtgcaggcgaaaaacctgacattgacacaaggggccaaccggattgatttcaaacgcgggactcttatccctattgcaggcgagggtgatacctcttggaaagcgattgataccgggtcattggggggaatgtatgccaataaaatccgtctggtgagtactgaggcgggtaagggagttaacctgaccaacctgacggcaacgcaaggcgacattagtctgacggcggatggtaaggtgactctgggcaatatacaggccaaaacggatatcaccgttagcagtaaaagcattaaaacggcggaacagagtcatgtgcaggcagggaaagagatcacgcttgccgcgaacacgctgaacaacaccggtaagattatcgcagaaggtgacatgcggttatttatcgaccatttatacaatcagtataaggggctgattcaggcaaataatcatctctggctgcaaaaagacgcgagcggtaatttaagcactgaaattaacaacacttcagcgacactgaaaacccataacggcgatattattattcgcgcaaaagcgttaaataatgcctgggatgccagcgtcgcggcgggaatgaacgcttatatccatgcaacgaagctggataatgatgaaagtcagtttcatgcgaagaaaaatctcatcttaaccggtcacgattttaaccgcgggatggacggtaaactctccgccgatctgaatgtggtggctgattttattcatcaactccgcggaacggcattcatctcggcgaaaaatattctgctgcatgccggtgaaattattaacatagggcacctcaacgcgggcaatgatctgtccgtcatcgccgagcgtcgaatgtatgccggccagagtacactggaggcaaaaagaaatctgaccttgattgcaggtaaagatattgaggcttttcaagtcgggttgaagggagaaaatattgaactgcttacgcgtgaaggcgacatccagatgtggggggacggttcgcgtatttcggccgacaacaatttgcggatattcgcggatcacaaactggatctctatggtcttttgttcgataaatcaaacacgataacgttaaacgcgggtcatgaaattgataccagccgggttaaattggccgtgcagaaaaatctgacactgattgcgggcaaaggtatcactgcccgtgaaaccgggctgaaaggggaaaatattgagcttctcgcgcgtgaaggcaacattcaaatgggcgggcatgattcgcgtatttcggccagcaataatgtgcagatgttcgcgagcaacaaactggatctccagggtcttttgttcgataaagccaacaatataacgttaaatgcgggtcatgaaattaatgccgaccgggttaaattagcggcaaataaaaatctgaccttaattgcgggcaaggatatcaccgctcgtcaggcagagttaaaaggggaaaatgttgagcttctggtgcgtgaaggcgacatccaaatgggacggaatcggcctcatgagttattagcctcaatttcggccgataatcatttgcggatttccgcgggcaacgatctggacctttccggtactcagttagataaatcacacaatctgacattaagtgcgggtcgtaacctgaatgccagtcgaagccaattgaaggcggcgggcaatattaatctgtttgcgggaaatgatttaatgttgcggcaagcgggtatccgggcgggacaacaagtcatgctcagtgcgggtcgcgatattgatatctctcggcccaatacgccagagagcctgttttatttatccgaattagatggattagacaaattctctgaattaggtacgcaaattaccgcgggtgatcacctgcaactcagtgcagggggcgatattgcgggtatcgcgagattaatatcgactaaaggaaatgtctcggttaacgctggtcgggatttactgttctctgcccggaaatattcgccgattaatgatggcgattgagaataactatctgagcgtgaatgagctggacagttttgcgcatcaagcccgcacctgtgaaggcgaaagctgcaaacaagtgatcaaggatatggtagacactaatatccgcaatcagcaggaaatgatggatttctgtaacagcaacccgacccagtgcgcacagaagtatggttatctggttgatcagtggccggtgtttgagcggaccctcaaaaatatggaccgggatggcacattgccagttgagttcagaaattacctgtcggcggtgaatacgttaggtcaggcggcaaccggcaaggtaggcgaactcggctggacaaaacgctttgaagcaatgggcatgagtcaggagactgccgctgcgatggcgatgacgttgcctgttattgttgagggcagcaaagggccgaaatcatcgccaacaacaaaaggaagcacaggcgcggttgttaatacagagaaagcggcgctggaaaagattgggaaaaacagtcaaggcacaacgaatctgggtgataaatcggctaatactatttatcatcaacagcttatcaaaaatgctgaaaagatatctaccgcgaaaccggggcaacaagttgcagcgccaagggatctgaatgagcagattttatggaaccaagttaaagctaacccatcttcaggtgatccacttagaggaatgaataaagatcctcgtttccctactgatgcaggattccagaaaatgcaagttacacatgagttaccagacggttcaaatatcaccatccattatcaatataactcaactactggtaaggcttatgatatgaagattacaactcctaaacggcctgaaatccaacctaagccttcaatcacggataaaaaatgatgaaaataaaaaagttcaaatcagaaaaaattattgaagtttttgccatatattggttcggagaaaaaacatacttttacggttttgctaaaggttatgacgggctgcttagttataacgcagaggaagtagaaattatagagtcatcgttatctggtgattttgttttctttgaaaatggcatattttacaagccactcattgaaaaaaatatattagatgacctgttagaagcagatccagttgcttatcaatgttttttagaaacattgaaatcggaaggcagaatagaacaagatttttgctaaccccagatcccagcccaagcgctgggatctcccctttagcggttagccgttctcgacgagccggataatcaactgtccgtgctcaacactgacctgcaccggctgaccggtggcaaagcccgcttcttccagccagttgcctttaagatgcaaactggggtgctggctgtaatagcgggtcatgccggtgctgcggtcttcgtggcgggtgcgggcataccccaccttatagctgcgccgggcttttgaaatcgctaaatctgcattacaatcgcggttagccatggtaactactcctgttagttgcctacggttagcagcgttaccggatggccgtctggtaatgctgcactaaataaaaatcgtctttcctgtagcaaattctttctacgatgtcagtaactgcgtcatcttcgaacgtttaagcaaactgtccatcaacacaatcagcgcctgctgatcttcatctgataatgaatccatctgcatcacaagcgcctgtaaacgcggattatgtatctgtggcggtgtcatgggttccagtccgacaagtgaatccagactactttgtaatacctgagcgatcctgaccacggcatccagttgaggaacggaagcgccgcgttcccaacggttataaacccggcgatcaacgttgagcagttcagctaatcttgcttgtgtcatcttgcgggcttctctggcttcctttagccgtgtagcaaacagttgcatatcttcctcacaaatccagtgtggtaatgagatgtgcattgtaagccctccttttaaactgcttgactcaatggctatattatagtctcatattaatgctactacaatgtctattgacaggtttttacaggaggtaatccatggcccgcattcccgataccgatttagcccacttaaagcaaaccgtctcgttgctggggctggcgcgtaagcaaggccgtacgatgaaaaaacgcggtgaggattatgtgctgcgctgtccgttccataacgagaaaaccccctcaatggtgatatcgccggctaagaacctgtatcactgctttggctgtggcgcagcggggtcggtgctcgactgggtgatacaaacggaaggcgtgacgttgaaaatcggtatccgccggctgcgggagctggccgggctgccggacatggacaatgcggttgtggccgcttcttcgttagccgcccagccggaattacaggcggcccccctgccgcgtccgaaactggccgacctggacgatgacgggcaggcgctgctgcatcaggtgattgatttttatcatcagcacttactggcgtcaccggaagccaaagcctggctggaacgacgcgggctgaatcatcctgaactggtcagtcactttaagctggggtacgcgggccatcacgggatcggcggttcagcgggcttattaccgtccaagagcagtcaggaaggccagcaactgcgcgacaaactatcaggtctgggcgtgttgcgtaccactacccggcaggaccacttccggggctgcgtcgtggtgccggtgatcggctggacagaatcggtcaatgtgaccagccgcgggcgggtgttgcaactgtatggtcgccggacccagccggattacaaagtgctgaaagacagcccgaagcatctgtatctgccgtcaccgctagccggggtctggaatgaatcggcgatgcaggcatcaaatgaaattatcctgtgcgaagcgctgatcgatgccatgacgttctggtgtgccgggttccgtaacgtgattgccgcgttcggggtgaacgggtttaaccgtgagcacctcgaagccttacagtatcacggcgtgaaacgggtgctgattgcctttgaccgggacgaggccggagaccgtggcgcgaccagtgtggccgctgatttactggaagccggtatcgaggcatggcgggtgcagttcccgccgggcatggatgccaatgactatgcgctgaaaagcggcaacgccgaacatgcgctggggctggcgttgcaacaggcggtctggctgggacagggaacagcgccgggcgcggtgttcagccatgagcggcccgtctcgccgacagtgacggaaaagccccaaagtgccggggtggctaaaccggctgctttagccgccccgtcggcgctgactgttgcccccgtgccctgtgagcgcacggcctgcggtgaactgttgatgaaaagcggcccccgggtctggcgggtacgggggatgaaaaaatccccggtgccggatgtgatgaaggtgaacgtgcaggtgcgggatgaaacgtccggcctgttccatgtggatacgctggacatgtaccatgcgcggcatcgtcagaactacatcagcacggcggcgcaagagctggaatgcgagccgtctgtgattaaacgtgaagccgggcgggtcttgctgatgctggagcagcaacaggacgcgcaacagcaggccgacgccgaagcctcagggacaacggcagtcacggtcagcgcggaagacgaagccgccgcgctggcgttgctgacatcgccaaacttaacagaacagattatcaacgacatggccgcctgtggcgtggtcggcgaatccaccaatctgctgaccgggtatctggcggcagtctcgcgcaaactcgataaaccgctggccgtgttaatccagagcagcagcgcggcaggcaagagcagcctgatggatgccgtgctgaacctgatgccggaagaggagcgtatccagtactcggcgatgaccggacagagcctgtattacctcggcgaaaccagcctgcaacacaaaatactggcgatagccgaagaggaaggcgtgcggcaggcggcctatgccctgaaactgttacagtccgacggcgagctaaaaatcgccagtaccggcaaaaacgaacagagcggcgaactggtgacgcgggaatacaaggtgcagggaccggtgatgctgatgttaacgacgacggccattgatgtggatgaagagctgctgaaccgctgtctggtgctgacggtcaacgaatcgcgcgagcagacgcaggccatccacgccatgcagcggcaccgccagacgctggccgggttgctggctgactcggagaaaggttatctgacacagttacaccagaacgcccagcgcttgttaaggccgctgaaagtggtcaatccttacgcccaccaactgacgttcctgtcagacaaaacccggatgcggcgcgaccacatgaaatacctgacgctgatacaggccattgccctgctgcaccagtatcaacgtgaagtgaagaaaacgacccaccgcgggcaggtcatcgaatatatcgaagtcacccaagacgatattgccctcgccaaccggctggcgcatgaggtgctggggcgcacgctggatgaaatgccgccgcagacgcgcaagctgttactgctgatacaagagatggtgaacgaacaggcgcaaatccagcactgccagccaaatgaagtccgctttacccggcgagatatccgtgcctttacccactggagcgacagccagctcaaaaaccactgtcaacggctgacggaaatggaatacctgctgttgcatggcggcagccgggggcacctgctgcattatgaactgctgtgggacggggaagacaacggcgcagcccacctgtgcggcctgctggatgtcggagaaccggactccgaaaccgccggcagtgaacgcaagtctgacccgaaaggtcgcaagtcttccccaagtccggggcaagtctggcctgagtctggggaagaaaaacccgcgtcatccccgatagcacaagggccggcgggggcacaagtccgggcagatgaaaacgcggttattagggaaaataatcacagagacgcattgcccgtgcccgacagggataaaacaccggaagccgtcccgacaggtcaggagagcaagtctgacttaaataaacgcaagtctgcctcaagtctgggtcaggtccgggctaagtctggggtgaaaaaatccccatccgagcaggcagagcacgggttcagcgtaccgcaagtcggggtaacggaagacaccgtgataaaaggaaaaaagaaaacgcgccccttgtctgcgcccacccctcaatctcaaccggaggtcaatcatggcaaaccgtaaaccccgcagaggaagcctgctgacagtagatgaagtgtaccgcaaacctgtcggtccggcgcacgacccgaagagcctgtatgcgttgttgctgcgctttgtggtgtggcgacaggaacggaattggtcagaaagcacgctgaaagtacagacgcaccatacttaccactttatcctgtgggcaaccgagcgcggcttatactacgcagcggatatcacgcggccgatactggagcgttaccagcgttatctgtaccagtaccgcaagaccaacggtgaaccgttaagcacccggacgcaacgtacccaactggaacccttgaaggtctggttcaaatggctgacgaaacagaatctgatactggcgaacccggcggcggacattgaactccccagactggaaaagcacctgccgcgctatatcctgaccatcgatgaaaccgaacagatactggcgcagcctgacctgacgacgttgcagggggtacgtgaccgggcgttgatggagttgctctggtcaaccgggatgcgtcggggcgaattaacccggctggatgtgtacagcgttgacggaaaacgcaaaacggtgaccatccggcagggcaaggggaataaagaccgggtgttgcccctcggtgaacgggccttaagctggctacagcgctatcagcaacaggtgcggccacaacttatcgtcaatccagacgtcaaggcattattcgtcgcaatggatgggctggacggcttacaggctaacggtatcagcaatttggtgacagcttatatcaacgcggtgggtatcgagaaaaaaggtgcctgccacctgttccggcatgcgatggcgacgcagatgctggagaacggggcggacctgcgctggatacaggccatgttaggccatgccagcgtggaatccacccaggtgtatacgcaggtctctatccgggccttgcaggcggtgcacgccagcacccatccggcggagcaaatggccgatgaaaaagtcagcgacgccgatgaggtgggtttactggccgacctgtacgccgacgataacgccgacacggacacgccgccggacagttcagagccgacctcaacccccgatagccgctgagcgtccgtacgcccccgttgagttgggcgggttcggtgtgggggcagaccgtggccggactgcccgttagccccggcgcacgcgggggtaaatagtcgtcaggcggctcaaccacgagcgtccccgttaagccggtccaggccgcccaacgcctattgaacataatgcggggggaattatacgcactgcgccggtgagcccgggcaaccgcctgagcattgatgagcggcttaatgcgtataattggcattatgtcttgcgcccccgcgggtcggcattgcggggagtggcgcacaaggctgcgccttatgctctaaccgactgagccggacatcggcaactctgagttcttctttagctgccctgcaaccgttgggccaacccccctaaaggcaggtcggcctgcggcctccgctcattgacttccccccgccccaaccccgctgcactggctgcgcccggttcgcagtcgcaggctccttgctcattcccgtgctcgccatcgccgccccgtgcagccctgtctcttgatcagatctccaaatcaactgatttagccagcaaatagccgtctatcagggtttgcagccgaaaccagccttcccaaagtcgttcccatccgactcgacccgtgcgtttggaatcgtaccagccggccagttttcccagattgatgaaggcccaatgcaaactcggggcttttttcggcacacggcgtttttcttgttttgaccacagtaatttccacgccagggggcttaatactgtctcacagctctctttctctgcctcttctttgttcagacccataaaacgcagctggtgtattcgtaccgcaataaaggccagcagcactatcatgcgctccagattatctttgctttgcatacgcagcgcttctacctgcgtgccgcccgttttccacgctttgtgaaattcttctatcagccagcggcgctcgtaataactgaatattttatgggcgtcttcctgactgttgacgggttcggaggtcagaagatgccagcaaagcccatcctccggacctttttcgtagcaaccgacataaaatatccgcaccgcctcaccgctttttccttcggggattttcaacgtcacttcggcataactgatatcacaatgcgcgacacgcgcctgacgcccgcctttctgtctgacctgaactaatcgttctccagcactctgtaaccggctaataaagtcataaagtttatcctgactttcctctatacgccggttttgcatcgaacggatgacgaaacgttgtttttggctcgttttataacgcagatattcgatgatatcggcttcacggtcacagacagaaatcacgttggccatctgctcccctaaccggctgtcgacggcttgtgaggcccgttcccacttataactctctttcccttcataagggcgtgtatcgcgttgtcggcttttgccataatcactgacatctcgacaccagcgctgttgctctatcaaccccacgacctgttgttcttcaggcgcaaataacaacaccgagtgtgcctgcatgccccgggatttttcctttgaggtggtatagccgagttcatcggcgaccgacgcatgggaaaatgacagggttgtcgtgtcttccagcgctaacaggcaatgataacgttgagcgtgagcgacggtggcggtaaatccggcttcggcgatggcctgaggcgcaatggcggaatttcgggtcagtcggtaggccgcttcaacatcggcaggagagtcaagagattgcacgagcgattgtcctatatggttagccaacgaacaggccactttcaccaggcggttggtacggcgtttatcacctaattccgcatgttgaaacgtgtcatttgcccattgttcggcgctggttgaaaacataaagattacctcaagtcgtgttttttattgagatcaatctatgagggaaaagttcaataacgcggggggcgggttaaaatatttgtgtaggaaagacaggtgcagcccccgggggcttccctgaacaaaatcgcgtggtcatgcaaggtcatgcgcaacccgaaaccccggtgcccccgagcgtcgcaggggcgccgcttgcgggctctatgccgcccgcgcccgcagaacgggcatccgccgcccaagcgagttgggcgacgttcgcccgttgccgaaaaaggcgctacactgacaatggcacggcgggaaaaaccggcctttggaggcgaaaagcgcgtcagggggttttggggccggcggtgaacgcccattggaaaaaacgggtggtaactggctgagggcattgggaaaatcggtgtttggcggtcaacttcgcaatggaatgggttgttataaacaatacctttatgccaccagcgccatcaatgctgccaagaatctcacactagttgcagcaggcaacctgctgacctccggggccagcttgacatccggcagtgatatgctgctgtccgcgggtggcaatgttcgctttgaatcgcgacaagaatttatccgcgaggggaatattgagcgctttacgcaacacgccagtcggctgaatagtggtggcgcattaactattcgctctcagggcagtattttattccaggcgacggcgttaatcgccaaaggggtgatggatattgcggcaacaggtggctttctctatgcgcaagcgatggaagaagtctacaggcgggaagaaacagagaaaagctgtaaaggtttggggcccataaagtcgtgtaaagtgtttgggtctaaaaccgaacatagaatacaaatcaagaagaccaacaaagtcacggaatttacggccgggggtgatattaacctgatggcaaaagatgaggtgacattggaagcgagtcggatagaaaccggtaaaaacgcgaaaatcaccagccagacagggaaagtgaacttcaaggcgatgcccaatattgattttgagcagagcatcacgacatcaaaaggcttttttattacacagcgcgataaaggtcaccgtgaggagacttggataatcccctcagtgcatgttggcggtacgctgacggtggaggcggcgacaggcatcaatgcggatgtgaaagtgaaagaggggcagttactggaagacgcgttaggggtactgagtcacactcccggtacggaatggctgaaaaatcttcaaggccgcaatgatgtccagtggaatcaggttaaggacgcttacagtagctgggacaaaaaaagcgaaagcttaaaccctgtagtgggtgcggtgattgcgattgcggtcgcggcggtcacggcgggttcgggcctggcggcctgggcgggaagtggtgccgtgggggcgacaggcgctacgggagccacggcgagcgcggtttatggggcggcttatggcggaatgatcgggttgacctcgcaggcggcggtggccttagttgaaaataaaggggatctcaccaagacactggctgccttagcgaagcgcgaagccgtcaaatccctcgtgacccaaatcgccgtgggtggcgcattagggggcttagaccacacgatgggctggggaaaattagtggagggaaaaggcgttgtcgatccgctaaaagcgcagcttcccttattgagtaatcagaattggagtcaggtggcccagcgtgttgcggcacaatccatcgtgagttcaacaatagggacggcgattaacggcggcagttttacggataacctgcaaaccgcgttgttgagcaatataggtaaccagattaatgcggaaggtgccaaactgattggtgataatggggagattttaggccattcaggcaagatattgagccatacggttgtggcaggcattagcgctgaaattgccggcggggatgccaaaggggcggctgtgggtgcgctggcggctgaattagcggcaatcacaatggaaagccggctatttgaaccggcgtataagaatgaaactgagcgacaaatccataagctacaggaagcgctgacgggtaatgaagttaaggctcagacggctaaatttatcggggcattatcaggtgccctgattagccataccccggaaggcgcttacagtgcggcgaacagcgcggagcttgtctatcgtaataacatgactgagcacatgttgtatcagttatcggtagaaaatcaaaaagacatcttagcggcaggaaaaggggataaagctgcggaagcgcgcgtcattgcgcggcaggatgcggcgattgccgttaccgcggtggcggcaggcggttatgcgctggtttatggcggccagatactgattgccgcctcggctgaaatggcaacggcagggcgtgttgcgcttgagggctgtaaaaccaatccggcgctgtgcctgaataacgtaggtatttttgtcgctgatgcgattgcgccagaagcggcggttgggacgggcgttttggctgcgggaacggtaaaagtattaggtagcaccaaagaaggtgccaaggatttggcagaaggattgagtcatgcgggtatgcaggtcgctgaggcattaacaccgggtggtgtgggtgctgcgggtataatcggtgcgggtaaaactgcggcggaagcggtacaaacagaagctgtagcggttattgcagctaaaaatctgcttaataagtctgttgctcaaaaaatagatgcagggaaatttggcaaattagggttagccgaacttgctgaaacaggaactaaaattgatccggcagctaaagctggaaatttcactgttgctggtagagctttgcagaagcatggaagccgtgagggcagcgcattccctgctgctaaaggaaatccagaacaggttaatcagcaaggacaaaaaatcttggaggagataattaaaacaccaagagctaaggttcaacaaggtaatcgttttggtggttttgatatagtagcaccggatggtcgtggggcgagatttgatcctcaaggtaactttcgtggatttttggagccataatgaataataggtatcaactgaaaattgtcatagcaagcgatatagattacgaatgtttggtagctgaaatttattgtaatggagagttttttgctcttttgcaacaagaagagggggttgaaaatattaaggtagaattttctcctagcaccagaataattgatcttgattggcttcaatatgctttatcaaaagccaaagaacatttattgaacaattgaactcgctcttgctttgtgaactgaaccttaatttttgggcagtttcatcggcggctaactttgtttaggtccagaccagatataactaactgagtgtattaaggaaaaagcatgtttatggtcagatttcatgatagagaatgttgttgctgaaaataatgttctaggagcagcaactggctcagacttgggggattttggttaagcaaaacactagactgcgatatgaccttataaggctaatattactaaaggtatagctaagggcgacaggtgttacgggagccttagttgaaaataaaggggataaagctgcggaagcgcgcgtcattgcgcggcaggatgcggcgattgccgtcaccgcggtggcggcaggcggttacgcgctggtttatggcggtcagatactgattgccgcctcggctgaaatggcaacggcagggcgtgttgcgcttgaaggctgtaaaaccaatccggcgctgtgcctgaataacgtgggtatttttgtcgctgatgcggttgcgccagaagcggcagttgggaccggtgttttggctgcgggaacggtaaaagtattaggtagcaccaaagaaggtgctaagaatctggcaggagaattgcacaatgcgggtatgaatacattgaagaatgtatctacaggtttgccaagccctcaggggttatcaaaagaaattcatctagggcaacaaggaaaacacattacagggcataacaactatattcctggacgttctccattagcggaaggtgtagatcctcaaaaattacttaatggtgttcactcaggtgaatatcccatcatacggatgactccacgtaatcaacctattgttaattttggtaaaccaatagggaaatatgaaggacagccaacaaattatggcattattcattatggaaaaaacggggcgcatattgttccagctaaccctattcagcattgaggtttttttatgatgttaaaaactataccagacgagttgtttatatgggtgtcaaaagctcttcttggagaaatttatccggctatcagagcaatagccgttggattcaataatgaaaaaaagctcctaacattaagatattatcttgatcgtgaaccgacagaggaagattacgaaagtttagatatagtcatagcgaatattttagctcacacatcatctaataacgatattagaggtgtaaacgatgaggtagttttctctacaaatccatttagagatcttgatagcttaagtggttttatatacataagaagagaatattagaggttaatgtaggtatcgcgattaacggcggcagttttacagataacctgcaaaccgcgctgttgagcaatatcggtaatcagattaatgcggaaggtgccaaactgattggtgataacggggagattttaggccactcaggcaagatattgagccacgcggttgtggcaggcattagcgctgaaatcgccggtggggatgccaaaggggcggctgtgggtgcgctggcggctgaattagcggcaatcacaatggaaagccggctatttgaaccggcgtataaaaatgaaaccgagcgacaaatccataagctacaggaagcgctgacgggtaatgaagttaaggctcagacggctaaatttatcggggcattatcaggcgcactgattagccataccccggaaggcgcttacagcgcggagcttgtctatcgaaataacatgactgagcacatgttgtatcagttatcggtagaaaatcaaaaagacatcttagcggcaggaaaaggggataaagctgcggaagcgcgcgtcattgcacggcaggatgcggcgattgccgtcaccgcggtggcggcaggcggttacgcgctggtttatggcggtcagatactgattgccgcctcggctgaaatggcaacggcagggcgtgttgcgcttgaaggctgtaaaaccaatccggcgctgtgcctgaataacgtaggtatttttgtcgctgatgcggttgcgccagaagcggcggttggaacgggtgttttggcggcgggaacggtaaaagtattaggtagcaccaaagaaggtgctaagaatctggcagaaggattgagtcatacctcaaacccgctgttaagcaatgctaaatctgatacccatgccgtagctagtttgatcgaaaatgagaagttgtatatagagcgcaactcgtcaacagcgacggaagctgttgctgtaggtatggcaaagaatggcacacaaggggcaactaatcagcttgttgatggcaaatggcttgatgcaaatggattacccctaccagtacctccaagcgtcggagctgctggtagagtaccaactgtattacaaacaggtggtaatactttaaataagagcacagctaatacactaaataatcaacttggtgagaatctgacaagtcgtgaatggggtcgggctcttgaggctttgaaaaaagaaaatggattgaggaatgatttccacggtcgaattttagataatgggaactatatagatgatgccgggaaggttattgggaatattggagattatttaccatgagtactattaaatctagggttaccccagtatcgagtgattatccgacttgttctgagtgttatgcacaattattgatttatccaggaatgatgcaccctgataatgtgagcaggctactgaaacttgaacctacacagaagaatattgttggaacaacagtaactaatagtcgaggaaaaacccgagaaattaagttgtccagttggtttttatcttcaaaatcatatgtagagtcgaaggatctaagggatcatatagattggctgttaaggaaattaaatcaatctgaaataggattaaagcaactgcaacgtactgagggtattagtataacattgagttgtgtgtggcgttctaaatttgggcatagtgggccggtactatggccggaacaaatgagatctatatctgacttagatctagaatgttcctttgatatatattttgatcctgataagtaaaacaaggcccgaagttgaaccggcatataagaatgaaacagagtgacaaatccataaaattcaggaagcgctgacgggtaatgaagctaaggctcagacggctaaatttatcggggcattgtcaggtgccctgattagccataccccggaagacgcttacagtgcggcgaacagcgcggagcttgtctatcgtaataacatgactgagcacatgttgtaccagttatcggtagagaatcaaaaagacatcttagcggcaggaaaaggggataaagctgcggaagcgcgcgtcattgcgcggcaggatgcggcgattgccgtcaccgcagtagcggcaggtgaacggtaaaagtattaggtaacaccaaagaaggtgctaagaatctggcagaaggattgagtcatacctcaaacccgctgttaagcaatgctaaatctgatacccatgccgtaacttgtttgatggaaaaagaagattcgattgctgagatcggtgcggggctgaagctcgcgcttagtcgttgtaccagttaaatcaagatcccagttataaaaaaagctgggatttttttccctttttggacgattggcaagctgttttcttttcggtgatgagttatctgaggataaaaaaacaggtatccattaataccagattttgaaaaggtacagaatcactaaaaacggcgtattccctgttatgtttaatgtattcaccgacaatgttatcctccagttattttacatttaactgccctgccatggctatttaaaagaatgaaaacagagatattaaagattttatataaaagacagctttaactataagtgaaattttaaaaaggatgttaattaagtttaatcgaagtccattaactatcaccattagcagcgagttgaaaataaatcatcgaggaaaagaatattatcttaaaaacctgatatgaatgtgatttttagtcgtttctttataataaagggataaagcggttaatctgacaggatttaaactcttaaaaaaatgttgaatatccgaaaaaacataaggtatgtttatatcgtaaaactatttatatgtttatttatgaagataaaaaatttataaaatctgctcagaatcaccagtaaaacagcgtcagaaaagataaaaatcgagcatggttaacgttgattaaacttaataaaaccagaggttaaaaaatggattttaataacatcttaaaaccagcccatcataaaaccatcagtgaaaagtgagaaaaaataatgaatttattaatatatacccgtaaaaaatgacaaacaagagtatataataggtttaatcagacagtatattttaaaaaagtaaccgactttaataacactttcaactgtagataaatttttcatcaaccagttaaataattattcatcaaaaacaggaataacaaaacctgaaaataaacgacgcaacagaatacgaactggattactgacatcgttgttatgttgaatttattatgcgacactgcgatacattaaatacatccgtttaaactcgttttacactattttaccctgtccaatagcattgcttttctatcattttatttaagttattcctctttttacacctttaatgtgattaaacgcttaaatacccacttagtcattacaacctttttggatggttaatccgacagaattttcactattgttaatataataagacgttattaaattaatttaccgatttatctaaacatcatttaaataaatatgagtgaatggagttaaatgaaaatataaaatcacatgacgaacctattttaatgaaaccaggataaaaagcgtaaaaaaagatatcctaaatataaaataaatctcttttttaaaatttaaacactttttatttaaatctgtgccttgaatcattaaaagcgcgtaaaatttttcaaacttttagtcaaccagtctatttaaaaacaccgctaaacaatcaaatcacgcttgaaaactgacaccgttactcgcttaccggtcaacaaatgcgctggagaatagtcagcaggatatcgcacgcctgctggatttgggacgcaataccattaagcaacttgaagaattggtattgatgtataaaaaattaccttcattcttatcaccactttacagcatttaatatatccgatttcccattgtcaggattaaagatccagacattgatcacatttcacactgcccactcagacgggaaattaataccacattagaatagtttaataatatcattatcaaatttttaattatcatctatgggaaaattaccgttttatcaccgcagcctgactgggcttattctgctgacaatctccgcactggcacaggcggcaattcctgtcagctcggcggatcaagaaactatcacgcaacaacaaaaagccttgttgcagcaagcccaacaacagcgggaagcgctgcgtaacaatatcaccgtatccccatcccccgttttaacgtcggatgcagctgaatttgtttgccacaccattcaacagattgaatttgtgggtgcagaaagcttgtcaaagtcagtcaaacagaacgtgattcacccttacttatctcattgtttaactttgcaagagattaatgagctggtgcgtaaagtatcgaatgcctatatcaaacggggttatgtcacttcccgtgccgacctcaaagcgcaggatttatcctccggtaccctcatgattaccgtgaatgaaggcaaaattgagtcaatcagccttgatgatgaaacaccatactcactcaaaatggcctttccgggcatgattggcaaaacactcaatctgcgagatattgaacaaggcatggagcgcctgaaccgcctgccctcccaacaggtcgccattgatattcagccaggaaaacaacccggttattctgcggttatcttaaaacgaacctcgacacgtttaccgatcagtgccagcttgggtggggataacagtggccagaaaagtaccggcaccgggcaaatcaatgccagtgtgaacctggataatccattacatctcgctgatcagtggtcattgtctgccagccataacagtgattttcgccatagccaccaaaaccgaagcctcacttctaatgtaacgatcccttatggctactggttgttcagttatcagtatgcgtggaatgactcttttcagaatattccggctgactcgcaagcctatcgctacgaaggcgacagccagacgcaccggctggcaataaaccgggcgttataccgtgatggcgaacagaagctggcgctggatctgggattgacgcgccgccaaacgaccaatttgctggcaggagagaaattatccatcagcagcccgacgttaagctctatcaaccttggcattaactacagttcagtactggcaggtggctatatcacgtttaacccggcaatcagccacggtttaccggtgttcagtgcgacaaaagaggatccccatttcccggatgctccacggagtcaattccgtaaatttagcctgagtgccagctattttatgccagtcacggattccatttattacctctcatccctttacggccagaccacacccgacaacctttacgccagcgaacgcctctcgctgggaggacaatattccgtcaggggatttaaagagcaatctctcaccggcaaccgcggtggatattggcgcaatgagctgaactggcgaatggcagagcttcctgtactgggtgaactcaccttaaccggggcgttggatacgggatggttacgaggaaaagcaggacaaattgatggcggtaatgtcactggcaccgcacttggcttctcactaacgaaccgccgattcaatcaggcgataactgttggcaaaccactcacttaccctgaccacctgaaaccggctcactgggtggtttactggtctgcatcactgattttttaacggtcaatcggcagcgttgattattaaggtcgccgaagagtgtgtcattgcgcagcggaatgctgcgattgccgtcaccgcagtggcggcaggtgaacggtaaaagtattaggtaacaccaaagaaggagggcggaagggttgagtcatacctcaaaaccgctgttaaaaaatgctaaacctgatacctatgttaatccatttttaaaataagggatattcttaagtcatcgaaaatttttaataacgtgttgttggttaattagcttttctttaatgcttaataacgctttattctatcaacaaaggttaaaagtttttaggattaataagtcagaaatgtgataacggttaaacaggtgtttaaccgttaacggcgagtgaaaacaactcgtaaaaataatgatattaaattgattttagcgttaaatcatactgacggtataaaaagcagaatggtttaaattaaacagtaaaagagagatgttattagatgggctaaaacagtgtaaagctggtttaagctatcatggttttatataataaatgtaaaataataacgctgaaagtaatttaatccatatgccgttaaatcatttattttatgggggtgttattcatatttttcatgattgatgatttaattggtttatgaaaaagtttattctttggtttaaggtgttattaaaggcgattccttttgaaaaaaattatctgattaacttattcatgtttttatttatccgttttccctgggagatataagcatcaataaaatcaatttttgttttcaatttttcactgatggcattataataggcaggctttaggctgttattaaaaatcattttcttaactcttgggttaatcggtataaagttttaacgatagttttaacgatagttttaacgatagttttaacgatagttttaacgatagttttaacgatagttttaacgatagttttaacgatagttttaacgatagttttaacgatagttttaacctgtaaaacctgtaaaacctgtaaaacctgtaaaacctgtaaaacctgtaaaacctgtaaaacctgtaaaacctgtaaaacctgtaaaacctgtaaaacctgtaaaacctgtaaaacctgtaaaacctgtaaaacctgtaaaacctgtaaaacctgtaaaacctgtaaaacctgtaaaacctgtaaaacctgtaaaacctgtaaaacctgtaaaacctgtaaaacctgtaaaacctgtaaaacctgtaaaacctgtaaaacctgtaaaacctgtaaaacctgtaaaacctgtaaaacctgtaaaacctgtaaaacctgtaaaacctgtaaaacctgtaaaacctgtaaaacctgtaaaacctgtaaaacctgtaaaacctgtaaaacctgtaaaacctgtaaaacctgtaaaacctgtaaaacccttttttcgcctgttttttattaagtttaatcatcatggcatattgtgttttatgtttatacccaagaaacttcaagatgcagtttttagcacctgaaaatggtcgttaattctagacatcagcgagtccgctatatccggtagcgttgtggtgaaaaatttgaagacgttgtctcgaaattcatgtttatccgcaaaataacggttatttcgaacctgttcattcatgaccttccataatcgctctattgggtttaaatttgggctatagggaggaaggtaatgtaactcaatattgctaacataagcccactccttaacaagatgagctttgttgtaacccgccccatccacaataagatgaattttttgatgatagtcaggataagactttcttatttcattgaaaaaacagcaaatattgtagtcattgatggtttgatattcctggaacaccgtacgaccaatggcattcaggttgagcgcgcccaatatattcaggcgagtccggcttcctgttgttttgactgtttttttctcgccttttcgcatccagccataaccgagtttggtgccttgagtcgggtgaacagcatcaagaaaaaggatgggttcgtctttcgctgtgactttaagattctcataatattcaataaattgtcgctgtttttctgcgtcgaatttatgagggacgccacaaggttttttataagaaaaaccctgacggtgtagccatttattcatgccgggaatgctaaaggtaatattccagagctgagcaacataggccacgatttcatgggtgtgatggaaaagatgttgagataagtgattgattaaaaaatcagtttgttcttgagaaagcaaactatcagaccccccattatcagatttaagtttaccttgattaaggtaatcgctgatatgacggttaacggtcatttcatgaagacgcagggcctgagcgatcatcactgaactccagccttcagaggccagcaggaccgctttgatgcgatcacactccctcttatcacggcaggtgtgatggagatgttcaagttcggctttttgttcatcggtaatgaatattttcatagcgaggataatgatctccatttcggataaaatcaagcatcttcaatgattacgggtatatacccgtcatctttcaagttgcctctttgttggctgcactcactcaccccggtcacatagttttctatgctcccggggattcgctcctttgccgtcgcgatgcatcttgaaatctataaggtataaaaaacattaatcacactcgctttttatctttataaatcagccggtaaatagcatgatgatgtaaagagactctttcgaataatcacgcttttttcagggtttaaattctgccaagttaaccggtttaacccatttttttatgacattattttaatggtctgctgcgtaaaatgatggaaataaagattttgaatattaaactgtatgagtaatattcttttacttgcttatttctttttaactttctgttaatgattgaagggtttcgattaaatgtaattaactgttctattaaaaaattttacttatttaattaaatctaccttttatataaaaaatttagtttctctttattatcacttttaaataatcatggtagattaattaaatgtgaagcaagcgaagaataatatcaccgatagatatattaaatatgacaataaataagctttttaaaatcacgctgtaccttttaaaaatgggcattaataatatgttgatttttttaacccttagttgaatcattaccgataaaaaggtgtttacgatcgctaaaaagggcaaatgaaagtaaaaagagaaagtgaataatgttaaaaacatgatgtgcttgctcttttttcctgattttaaaaccacactgacagctaaaaacggattttcttaatacctgttttatcaccttgggataaagatgtggttaatcattattttaatgagtgaaaactgcataactatttgctttcaaatggaatgaaaaatggcaatccatataacttaacctgaacaaattggatcgttggagtcaatagaaaacgcgacaccgaaagattaaagacattaaaaacagggttaaatccctctggtggtagcaaaatgccattcccatgtaaaccgtcagtacaaattttctcgttttattactgaggaaaactcagcagtgatagtcgagacgttaaaagtcaataatctgaaagatgaatgttcaccatgtgcacgttggttgtaaataatcaccaatgtaataataaattacaatacaataacttatgtttcacatttatctatattggtgaaagttgatggcaaatataaatttaaaaaaacacctttcttgagaatttttgtttttttattgaaaaataaaaggtatttagaatattgttccccgtaacaatttaaatataaattgtttttattttatactgaaaatatttatatgatttttttatttataatataagactaaatttatttgacagttttgtatttgatgattattgttcttccctgattcgcaaatgttatttcaaacataataatatctttggttattatatgcatttaatataaatgatattttatgacattgttcaatttgttgtttttattgtgaattttaattttcataaattaatttacatgggttattatatttaattgatgataacttgaaactatttccaatgtgataatttgtcattgcatatttgtttttaaatttagtgtaaatctgagtgtgattcgtcattttaattactgatgaatacagggttattttttacaattgatgtaaagcagtaaaaatatcctcactataagagggcggtaattatttgtccgtcgttattgacaacatatttaaaataaattggccacaggccatataggagtaaataagtgaaatacgactttattgtcgttggttccggggcaattgcaggttcaatcgcctatgagctggcaagcagaaatctttcggtttgtagggttggagagactgatcgaactaatgctgcttcgaaagcggcgggtgcaatgaatgggtgttttggcgaaattaccagtggtttattagcgagtgaacacggtaagttgaaattgaatatggattgtatttccaaagagctttggccggcttgggcgcaacggttagctgactcttccggtgatacccgatcactgttcacggctaaaggcactcacgtgatactcaacactgccgggatggaagagattgacagtatcaattatgacgctatcgaacaaaccctaaacgattatgcggcaccttatgaaaccattgatccgcgtgaaattgagtggttaaagcccaacgatttagtgcgcccgctgcgtgctttgtacatccctgatgagcatgcgctgaactcgcatttattgctggaaaagctggatgcggcattggtggctgaaggtggaagtcttaaagaagagaatgttaagtgtgtgttgattgaagagggtttagctaccggtgtcgaattgctgagtggcgaacgtttaatggcagataaggtcgtcgtggctgccggtgcgcactcgttggatctgttatcaaatataccttctattgttcgccaaattccgccaatctttgccggctatggggtatccattctggtcaagatgccgaaaggcagagaattaccgacttcggtcatccgtacccctaaccgggcatttgcctgtgggctgcattgtgtgccacgtggtgatggtgtgctgtatcttggcgcgaccaatattctgtctgaaaaaccacgcagtcaggcactgatttctgatgtgcagttcttgttggattgtgcgttagatcagttagatattaacttacatgatgctgagatcctctcaattcaggttggtaaccggccaatcccggctgatgggttcccgttgatcggcgaatgcggcgtgaatggtctttggttggcgaccgggacttaccgtgatggcttacatcaatcaccgttattagcggattatgtggctaatgctttgacgggagtagaaaatacactgattaatcttgatgatttcaatccagttcgtcctccgttggtcggcttctcccgtgacgtgatggcgaaagagactgctcaacaaatgtttgctaccggttacgaatatcgttgggatattaaaccttactggctgccactgctgaatgaagggatgatgcgcaattatcagaatttaattgagtctcttcaccctcaattcacgccaccgccagagttggttgccttctcccatatttatcaatccatgcgtgaacggttacgcagttattatgaggcttggtcatgagtttttcgctgaaagatcaagttgtcattgataacgccaggaaattactgtcagaggccgacgtttgggatgtggaaactgatctcacgtgcctgattgaccgttatctggaaagacgttgtaaggaccgcgcccgtgatgaatttatgcttgcggttcatgaacgctgtaaccgaataccacttgggcatattgtcggtactgtggattttgatggattgcctctgacggtggggaccggggtatttattccgcgccctcatagtcaagttattcataaatggctggagaatgaatatcaagcgcctcatggggctgtggtgctggacttatgctccggtagtggtgccatcggtttagctattgctaaacgtcgcccagatttaaaggtcacttgtgtcgaatatgatgatgtggcttttcaatacctgacgcgcaatatctatcggttggcgaattgggcgattaaagccgatgcattaaaagcagatttacgggattggcaagcattttctcaatttaacggatcggtagcgttgattgtagctaatccaccttatgtgccagaacagcaggaaatattaccggaatgggaggaacatcatccttatgcatcggtgtattcgggggatgatgggcttgacttagcacggttgattatcaaacaagctaaacagctactgcaatcagaaggttggttagttattgaacatggtgaaagtcagggagagagtgtcagagcattattttcagatgttggcttctcctcggtacgaactattatcgatgaagatatttctgacacaacgggcagttcggtaatcactgttggttgtaagcgcatttgaacttagacagttggagtctagataatggatgtaaaacataagcaggactggatgacaattcgtcggtcacggacaaccggtgccttagcgcaagctatcgacgaaggtttgaccagtttcactgtggttgaacgtcaaggtaagcaaattactacggaggaaggcaaagtctttactgaatttgtttcctgctcttatttgggattagaacatcatcctgcgttaattgaagcggcaaatcaggcaatggctaaaacagggatacatttgtcatcatcccgtggagcgatgcgcccgcaatatttggggcaattggagaaactgctggaagagatttatcaaggtggtgccgttgcggtgtttacttccaccagtaatgttcatcttggtgtattgccgttattggggagtggctctctacctaactatcctctttctcggcctgtacattggttgatggataaaactgctcatgcctctatgcaggttttacgcggtattctggagcagttcggaccggtatcacgggttgatagtgctgatgcgcagtcagtacagcaagctttgcagaactgtaaggagaatcagcggacacctatcctgctgattgatggtattggttcaatgaatggtttaattccggttgcagaattaacgcgacagttggctgctgctggaggctatgtctatgtagatgatgctcatggtatttccattatggggcgtcatggtgcgggttatgcttttgctgcacttgaccatattttgccatccaacctcatacttgcaggttcattatccaaagcatttggtggtgccgggggttttgtggtggttgcaggtgccgatgatgtcgaagtgatcagtaccttagcgaatcctctggtttttggtcattcgatcatggtgccgatgttggccgctaacgttgcctcagcaagacttcatctcagccttgagatagacatccggcaagagcagttatggaacaacatcaatctgtttgattctctgatggagaacagtttgatgaatgcgggtgtgcaatctcccgttcgcggcgctttattcgaaaatgaagcggaagggcttgaagctgctcgtttgctgcgtgataacggcatcttattattcccggtattttatccactggtcccggatggcaatgcaatgttacgctttgctttctctagtgagcatcaggcaggtgaaatcaagcagctagcaaataccttatttgaaataagggaaaaagggctgaattgggttgagccacaggctgtggttccacaggtgtaaatgacacccgcttaccaataaagaagataattgaaatgaatcagtgacgaagatcaaacatatgactcaagcaataataaataaacaggaaatattacaaccttacagggaatctttggatgttattaatatgcagattttggcactgctttctgaacgtatgaaagtttgtatgaaaatcgctgaggtaaaagcggggcaggatattccgatgatgcagccacaacgtattacctcgttattgaatatgttgcgggataaatcaaccgattttgggttacggcctgaatatactgaatcaatatttcaactggttattgaagagacttgccgtcgagaagaagagctgattgaccagttgttacacgagaaagtaaagaataatgaaaatactgctcattgataattatgattcctttacgcaaaacattgctcaatatctgtatgaagtgacgggcagtgtgccgtccgtagtcaccaattctttgacttatgaagagttaacgatagacgaatatgatgcggtagtcctttctccggggccaggacatccggctgaaagcagtgattttggggtctgtgctgaagttattgcacatgccaaagtgccactgttgggtatttgtctcggtcatcaggggattaacctggcatttggcggcgttgtagaacatgcccccaatccggtacatggctatcgcagtcgcatcaggaacactggagaaggattgttcctcggtttgcctgaacagtttgaagtggtcagatatcactcgttggtatgtacccggttgcccgacaatctgaaatgtactgcctggactgatgatggcttaatcatggcaattgagcacaccgaaaggccgatctggggggttcaatttcatcctgaatcgattgattctgaatatgggcgtgagctactcagtaatttcgtgcggatagcggagacgtataaagagaataatgaacaggaagttaccgctcagaatatatgtactgatatcaatgaggcttatcttgcagtaggtggaagacaagatctcaacctgaattatcgtgaatgtaaggagatagtcgatcctgaatccttgtttattcaacgttatggcaatgatacgcatgctttctggcttgatagtgaaaattctgatagacccaatgcccgcttctcaatgatgggcagcggtaatgaacaaggtgctgtcagacttgaatacagtgtacagactgagaatttgcgtttgatcggtcctgatggcgagaggattgttcagggagattttttctcgctgatgtctcagttgcttgatgtggtggcaatttcgacaccaaaatcgatgccattggtatttaaaggcgggtttgttggttatttaggatatgaattaaaggcgctgacaattggcagcaacaaatatcgttcagaacatcctgatgccagcttaatatttactccgcatttttttgtcttcgatcatcagcagagtaaactttatgaatgttttatcacaccaatagggcagccacatcattggtcaccggaacttttcgttaccaatacaaaaaataccggtgaagtgatacctgactttattcctggcgctgttgatcaaaataagatttgtctggaatatggcgctgagaaatatatggatggaatccataaatcactccaatacatcacagatggtgagtcctatgaaatctgtctgacgaatagggccaagatgacttattcaggacatccattggacgcttatcggcgtatgcgtcatgccagtcctgtaccttatggcgcttatctggcctgtggggatttttctgtactcagtgcatcaccagaaacgtttttacgtattgatgacgccagaaatattgagtccagaccgattaaggggacccggccacgcggaaaaacggcagccgatgatcagcatttgcagatggaattgagtcagtctactaaggatagggcagaaaatctgatgatagtggacttagtgcgccatgatcttaatcaggtatgtcgtccaggtagtgtgcatgtacctgaattatttaaagttgagagcttctcttctgtacatcaattggtttcgaccatacgcggtcaattatgtgaagaaacgtcatccatagaggctatccgggcatgttttccaggaggatcaatgaccggcgcaccgaagaagcgcacgatggagattattgatgctttagagtcatcggctcgtggtgtttactccggtgcgcttggatggttatctttcagtggtgaagtggaattgagcattgtgatacgcaccgcggtattacatcaagagtgtgctgaattcggcattgggggggcaattgttgctcattctgatccttatggcgaatttgaagagacattggtcaaagcgagtgtgccatatttcagttttagtcatatggcggaggaagtgtgtgagtaaccataaagtggtcatccttggtgggcaaggcgctattggttctttattagagcgcctttttactcaatatggtcatattgtatacagtgttgacaaacgaacgcagggagtgcgttctcattactatcattctcattactgtcagattgatatcttaaacccggctgctgatgttggagcggttttgagtggggcaaaggcggtcgtctttgccttaccggaagccgtcgccatacaagcgttgccttgggtgttatctgctattggtgatgatgtacagatcgtgtcaacctgttcagttcaggcccctttttattctgcattaagagctgccgcccccgggcagcctttcattggtgttaacccgatgttctcgccatctttgccggagcaaaaaaggccagttgcagtcattctcgataactgtcatgttagtgaacattggattgagcgggtattgatgcaggctgatatgcgtatcagtaggatgacgccggaggaacacgatcaggttatggcgctttgtcaggctttgccccatgccgcgatactgatttttggcttggtgttggcgaaaagtccgttagatattcgtaccttggcagctattgcgccaccgcccatgcgtaccatgctggcgttattatcaaggatcttacgcaatccaatagaagtgtactgggacgttcaatatgaaaatccgatggctgccgaaccgcgtcaggagttgctgcatgccatacaacagttagattcgatagtacaggctggcgatcaaactgaatttggcaataacctcagagatattgcgcaacaactgggggaacagcttgatatcagtgctgctgattgccagcatattttttcaacgcttgaatgagataggataggagttgaggggatgtcgttaaatagagttgctgaggctaacgggcgggcaggactcagaaattggctaggattactgatattgatgttaccagtattgctagtgactgtggacaatacgatcttaagttttgctttaccaaaaatagctgaagctctgggacccagtgcaagccagcaattatggataattgatgcttattcattggcattggctggtttgctggtatcaatgggaagtattggcgatcgtgtgggtcatcgttcattactgttatttggatctttggggttcacggttatttcggtgttcacagcactgtcaacttcacctgaacaattgattttagggcgagccgtacttggattttttggtgcgatgctgatgccttcaactttggctttgatcagcgttctttttgaggatcgtgaacagcgtcgattggctgttgctatctgggcgacaacattaactatcggttcggccgtaggtcctgtagtgggtggtgttctattacaattcttcgattggagttcaatttttctattggcagtaccggtattagtgccattgttgatcttcggaccgatgttattgccagagtccgataaaaaacagacgggcattatcgatgtgtatagtgttctgttatcgatcgttgctatggttggtattgtttacgcgattaaacaccttgctagtgatgggtttgaaataagtgtaatactcgaactgtcggttggtcttattgctggtgtgctatttgttcgccgacaacagcgtctgcctgtgccgttgatggatctttctctgttccgcaatggtatgttcacgggttcgattattgttaacttactgagtttggcattgctggttggttttgtcttttttgccacacaggtcttgcaaattgtgctcggtatgaagccgattttggctagcctggcattggttcctggacaaataatggcaattgttatgggtatggcgatagtgcctattgctcaacgggttccggctcattatctggtgccaattttgctgagtattgcaggtattgcatttcttctggtcgcgagtatcggcagtgatttagtcactctgattgttgctttcgcattattagatattagtgtgggggcaattgcttcggtgtctaacgatttggtgctttcgtcagtaccctcctctaaagcaggggcggcatcatcaataagcgaaactgcttatgaagtgggtgttgtacttggtacgactattctggggggattggttactgctttctatcgtatgacattgcaattaccaaatgagatctctcaggaacagacgggattagctttagagactttagcgggggcttacgttgtcgcgaattcattagctgaatcagaggggcagaagctgatgacagcagcggcggaatcattcaccagcgctattcatatgatgagctggatgacagtggtattgaccgcaggagtggtattgctcgcttggcgtttgctgaaagctccgcagaaagaacaagtgcttgagtattgatagtttgacgtgcagccattgtaaatggctgcactgcattatgataattattgattttgttctataccttatggatttcaagatggatcgcgacggcaagggagcgaatccccgggagcatagagaactatgtgaccggggtgagtgagtgcagccaacaaagaggcaacttgaaagatgacgggtatagaattgaaatttttaattggctactattgaaagatagtgatgtatcacagaaatattccccataattaatggaaaaaatgggaatttatattaatattttaaattgtgtaatttcaatattgcgtctaattgctctctgtaaagtgaataaatacttacctaattaactctcatcgtaattatttttctggcctacctgttgttgaagtggctgtatattttgctagaaaaatcggtgctttcgttatggctaatttggtgattagccagaggcaaaactttgactatcagcaagttagtgacataaccggtagtgataatagtagaaactttggaacttggttagatagataattaatatatgaagttattctaaatgtataaatttaaactcaggagaattcacatggataaaataagaacggttgctgagactttggcaatattatatcagtatcattatccgtttggtctggaacgacagccgaagcaactaaagacctcggattttgacggtaaggtaatattctccaacgatccagaaacagcgactgtgccaccggcattttttacggtacaaaccatacaagagttgaaagcgcttggcggtgtacctgacagtgagtatggccctggaaaaatggaaccccatcatccgttaccggagccgttttctgctgaacgactggcaaatgtcactggtaatcatattgatctgtgcaaagcttttagggcctatatctatagtgattctgctttagtcaaagattatgaagaaatacttaatgctaagcgcttcccgatgaaggttgcgttatacagtggcgagaaaatgactatctcctccgataatccattggttgttgaagataaagatgattatggtgaaccggttgtcttggtgtatgagcagataatcattgaaccgggaggtcaaattatttaccgcactaatggtcgaatcgaagctaacactattgtagggaatgaaaatactggaaaggagaatgttgtcaatagaggcagtaatggcgtcgatggtcttgatggtgcgccaggaaatcaaggggctaatggcagtgatggtaaagatggtaaagatagtaaaaatggctgcttaattagcgccacatcaggtactgatggagccagcggttctgtcggaggattagggggggatggtgcagcagctggaaatgcgaatgacctgactgttactactagtcaatcttttactggaacagtaaatgcggcaacgataggtggtaacggtggtaacggtggaagaggcggtcttggggggcgtgggggtaatggggggaatgggggtaattggggcaatggaacaatcaagtggtgtcctgctggggcggcagggaatgggggcactggaggaaatggaggcaatggaggcagggggggtaaaggtggggacagtggtaacatatatattaattactctgacggtagtccagtacttcaggttgtgtcaattaatggtcttggtggggaaggtgggaaggccggttggggaggaatagggggtgaacctggaaatagtaccagagtactcggtgtacatggtttgcagggggactatggtaaagatggtcttaaaggagaatttggagatgacggtaacaccggcaagatatatgtcaacggtcatgaacgggaatctgatcggaaacttaatcgctagtggtgccgcaatcagacgggtctgaacgacgataaataaggggaaatgggggcagatcttggttttgcttatgttcaagtggtttacattatgaattactgaatacttattggggctggccttgctggttggcttcgttttttgccactcaggttttacaagtgtgctgagtatgaatccgattttgcattggttcctgggtaaattaatggcgattgttatcggcatggcaatagtgcctgttgctcaatgtgatttttgaagaatataatcatgattatattcttttatttgtattttctaataatacctaatgagacaaatataaaattgaagcatttagtcagtacttattaaaaggttgtgatgtatcacggaaatattctccttaattaatgaaaaaagtgggaaattacattaatattttaaattgtgtcatttaaatatcgcattcaatcgctttctgtaacgtggataaatacttgcctaattgattcttatagaaattatttttctggcatacccgttgttgaaatgcgtatataccctatggatttcaaaatgcatcgcgacggcaaaggagtgaatccccgggagcatagataacgatgtgaccggggtgagagagtgcagccaactgaaagatgacgggtataaatttaaattctggagaatatctatggataaaataagaacggttgctgaaactttggcaatattacatcagaatcatcatctgattggtgtagaacggcagccaaagcaacttaagacctcggattttgacggtaaggtaatattctctaacgatccgaagacagcgactgtgccacctgcattttttacggtacaaaccatacaagagttgaaggcactcggcggtatacctgacagtgagtatggccctggcaaaatggaacctcatcatccgttacctgaaccattttctgctgaacgactggcaaatgtcacgggttatcatattgatttgtgtaaagcttttagggcctatatgtatagtaattctgctttagtcaaagattatgaggaaatgcttaatgctaagcgtttcccaataaagattgcgttatacattggcgaaagaatcactgttaccgcagatgcaccattgcttgttgaagataaagatgattatggcgaacccgttgtcttggtatatgaccagataatcattgaaccgggaggtcaaattatttaccgcactaatggtaagatcgaagctaatactattgtagggaacagcaataatgataaaaagcagagcattatcagtaaaggctctgatggaggcgatggttttgagggtgaacagggaagtaatggggttaatggcagcaatggtaatattggttcagagaataaacatggttgctctgttaaatccacaccaggtactgatgcaactggcggttcttcgggagcaccagggatggatggcaaaagaggtggcagtgcaaatgacgtaattattaatgttgacatttttactggagtagtcaatgcggcatcgataggtggtaagggtggaaagggtggatatggcggtaatggcgggaatggagggaatggtggaaatggaggagctgcaacaaacaaatgtagtgctggatatggaggaaggggaggggatggcggtaatggaggagatggcggtaatgggggtaacggtggggacagtggtaacatatatattaatttcactcagggtcagccagtaattaatgctctgtcatatagaggagatggcggtaatggagggggcggtggtaagggaggaataggcggagtaggtggtgttggtagtagaggattaaatgctaatagttatcttggagtgtctggtgaagcgggtaatgatggagaatccggcaatgcagggacttctggcaagatatatgttaacggtaatgcacggcagcatagtgataatcagactttagactggcttgaagactataaataagctgaagtatagcaactgaccgcctctcctgaaaaattcacttattagttgaatccagcttgcataattggtggtcttatttttctgtgccagcaatatttaattgtatacccgttatccttcaagttgcctctttgttggctgcgctcgctcaccccggtcacatcgttatctatgctcccggggattcactcccttgccgtcgcgatgcatcttgaaatccatagggtatatacccgtactcattgaagatgcttgattttacccgaaatggagatcattattctcgccatgaaaatatttattatatcagaacaaaaaatcaaatttgaacgtcttcacgacataactcgtgatggtcaagaatgtagcgtatttaaaggttgagtttattcgtggaaaaatcctcttctggtaaagagagttattttctacttttaatttaaattatattcataatttcattattcaataatatctatgggtttatatcttatggttatttttgaaaatacaattatacttgttgtttttatttgtattttataataatacttcatgagataagtataaaattgaaatttaattagtatctattaaaaggtagtgacgtatcacagaaatattttccataattaatggaaaaaatgagaaatgacgggtatagatggagggataggaaaccctggagagcgaacaggaaatgtagggcagatagatgttaacggcgaattgcaagagtgtgattaaagaaagtctatttccatttcctaaacacaaactatttggaaacgagtagattaagaatagtgagattatcggggtgaaatctaaggtttttcatcaaaacgactgtcgttctgtcgttaattcagtgcaccatagggttaatgtgtgcactgaatttgtagtgtaaaattttcgagaaaaattatttcagccaacctttcttctgtgcagtttccaattgtggcagcagatattgccacaattcaggataggtattggcaataaatttattgcggttaatcacctgctcaaaacgaatattattttctacccaactctgtcctttattatgcagattcatcagaatcggcattagtctatccagtgtaatggcgaaacgggcgtcttggctttctcctgcttcatactcttgccaaagtgacataaaatgatttttctgtggttcggggagtaaaccaaaaagacggttggcggctttaacttcttgttcatgaatagcttcacgagccgtcaaatcgtaaaccatcacatcaccagcatcaatttctacgatatcgtgaattaatgccatctggataactcgttggatatctacttcttgtgcatatggcgcaaaactcattgcggcgatagctaaatgccagctatgttcggctgaattttcctgacgatggttatccagtaacttaattcgccgctgaactttctttaacttatccaactccattaaaaaaccgacgatattggtaaaggggccaaaatcaacgacagatactgctaacgacatacaaacctcatctatttttcttcgttgagagaataaggcagaggctgaatagtgagggaatgcccttcatcgtcacggacgcggaatacactatgactttccatatcattattcatgacgacttgtatccagacattatcattattcaacttaacggcagccaaaacggtacccgttctccgccacttatctcctaattgccattctaaatcatctccggccatcggaattttagaggcactgccagccagccagtacatgccacgtttatttgctccgcggtatttagcacgggctaccatttcctgaccggtataacacccttttttaaagcatacccctcccgccaatgcctgaaggttagttgcttggggaataaattgtgtactatttgcggcatcaatgattgggaagccagcttcaatatccagagctaaccactgttcactgttattaagctgagcttgaagtttttctgttaactgttcagcggttgcggtgtttgttaccagaaggaaacgttcagacggcaaggaaaaatggagtagtgtggtggcttcatgtgcaacgacagcgttatccgcatccggcaaggttgggaagaagctgcttaatgcttgccggcagtttttacctgcaacaccgagcagtagcgcgttctcatcctgagcaagagcaattttggagaatacggcatatttttttaattctgtaagctgattttccagcacactgcgacgttcaatataagcaaagctttcaccacgatggaagaggcgcagattactccacattttgccttttgcgtcacaatgcgcactaagcacatgctgattcgttgcaagtgcggaaatatctgctgtaacctgaccttgtagatatttttctgtatccggtccagttgcggttaccaggccccagtcatctagtgatattaatgtcaggggaagggtcgatgaagacaatggaaattgtgaagagaacggagttttataagccatgacacatcctgccagtcagatatttgagccaatgatgcataatggtaaaagagctgaagcacaatgcaagtagttattattgctattagctggcatgatgcatgagtttgccgggcgacttaaatggctaatagcgttaaaactaacaatgagaattaaaaaggggattttttgaacatggatattgataataaagcgcgtattcattgggcatgtcggcgtggaatgcgtgagctggatatttcaattatgccgttttttaagtatgaatatgactcactcagtgatgatgataaacgactttttattcgcttacttgcatgtgctgatcctgatctattcaactggctaatgaatcatgggcgtccagaagatgaagagttatttcgcatgattaaacttattcagaatagaaataaagatcgtggtcctgtggaagtgtgatctcagggtatcttggcatacccagctaatttctacctgtgttcatggtgcaatagcgcttatcgtactatttgctccgtggcctgcggatgacgctattttctggattttctggcttcctttggtactgttgattattgccagttgggggcgtagccagaaaaatatccgtaaatctcaagggcttttagttcttctcagtgataataagttgcaatggaagaagcatgagtggcaaattatccggcggccgtggttgtgtcgttatggcgtattaattacggctcaatctttttataaccagaaaaaaatccgtttatgggtcgcatccgatggtatgccacaggatgaatggaggaatattaatcaactgttgttgcaatatcctgatatctgattgagctggaattttcctgagttaaagtagaggctccatttcttgcaggatttgcatacaccattgcgataaacgatcatcagtttgttcatactggtttacgtcatctaaagccagcccgacaaattgtgagccattatccgttaatggtttcgggctggtaaactcatagctttcagttggccagaagccaataaaatgcacgcctgaagggcgtaaatggtgatatagcataccgagagcgtcgaggaaccaatcgctgtaatcaatttgatcccccataccatacatggcgacaattttcccttgtaaattgagggaagggatttgatcccaaataaccagccaatcttcctgcaattcgccaaaatcccatgttgggatgccgagaatcaggacagaatacgtttccattaatttaggtgctgtctctttgatattgtgaagatcaattaaatcttcgccaaggatatcgcggattttctctgctaccatctcggtgtagcaggtgcttgagccgtaaaaaagaccaatcttcatcattaatcattatggtttttgaatatctggattggcattgtaacagaataattgctttttcaggcataatagccggcagagatgtacagatttaaggaaagtaattcatgtcaaaacaaccaactcagttgactaatccactgatagaacaatttcttgatgctatctggttagaacatgatcttgcggaaaatacgcttgcttcttatcggttggatttgcaggcattggataactggttgatacatcatggtcataatttattatctgtccagacgatagatttgcactcttttctggcagaacgcgtggatggaggatataaagccagtagttcggcgcgtttactcagtgccatgcgccaattgtttctctatttttatcgggaaaaaatgcgggaagatgatccgacagcacttttgtctgcaccgaaattaccaaagcgattgcccaaagatttaagtgaaaagcaggtagaagatctactcaatgcgccctgtacagatcagccagtggaattaagggataaagccatgcttgaagtgctttatgcctgtggtttgcgggtatctgagttagtgggattgacactttccgatgtcagtttgcgtcaaggcgtggtgagagtgattggtaaagggaataaagaacggctagtgcctttaggggaagaagcaatttattggctagagaattatctggaatatgggagagttgggctgttaaatggtgcaacgttggatgtcctttttcctagcaaccgagggcgacaaatgacccgacagacattttggtatcgtattaaacattatgcgctgttggctggaatcgatactggacggttatctcctcatgttttacgtcatgcatttgccacgcatttgctaaatcatggcgctgatttgcgagttgtgcagatgttattggggcatagtgatctatctacaacacaaatatatactcatgtagcaacagaacggctcaaattgctacatcaacaacatcatccgcgagggtgagcacggatttaaaggaactgaaaatgaaaaaaagcgtgttatgtttccctcttttgctggcctggtttagtggaaatgcgcttgctgatgatggtgctgtccatagaataatgcaaaaactagggataaaagcagaaagcatccagccatcacctatcgttggtttaaatacggtagtgactgagcaaggtatcatttatctatctgatgacgggaaatatttattacaagggccaatttatgatgttagtggtagcgctcctgtgaatgtcagtaatcaattattgatgaaaaagctggaagcaatgagagatcaaatgatcatctacaaggcgccagaagagaagcatgtcgttaccgttttcacggatattacctgtggttactgccataaattgcatgaaaacatgaaagagtacaataaactgggtattactgtgcgctatttggcattccctcgtcagggtatgcagcaccaatctgctaaagatatgcaatctatctggtgtagtgcaacaccgcagaaatcattagatgctgcgtttaaaaatgaagatgtttcgccaattaagagctgtaaggtggatattgctaaccagtacaaattaggtctccagtttggtgtgcagggaacgccggcaattgtccttaaggatggcagcctgttaggtggatatatgccaccagaggctttggcagcggcactggcgcaacgtggtaaatcagtttagtgaatattgaaacacaacttcgccgccgcttggcggtgaatgacagtcaccttccacaacagattcatccactactgcgtcgcttatatgccattcgtggtatccagcaagctaatgaattggagcgtggtgttcaaggattattgaattatcagcatctaagtggtgtggaacaggcggtggcactcttgttgactgcacttcatgaacactggcgtatcgttattgtcggtgattttgatgctgatggggccaccagcacggcattggcgatccgatcattacgctcgatgggatatcgccatctggattatctggtaccaaatcgttttgacaatggttatggtttaagctcacaggtggtagaagaggtcgttaaaaaaggcgctgacctgattattaccgtggataatggtatctcttcccatgaaggggttgcggctgcccatcagcaccgtatgaaagtgattgtcacggatcatcacttgccgggtgacgttttgccggcggctgatgccattattaatcctaatcttgccgattgttcgttcccgtcgaaatcattggccggggtgggtgtcacattttatctgatgtctgccttaagggcggcactgagaaaagatcaatggtttgaaaagcaaggaatagcgctgccgaatctggccgaaatgttggatttggttgcgttaggaactgttgccgatgttgtacctttagataccaataaccggattctggtttatcagggcttgaaccgaattcgtgcaggacgctgttgtgcggggatacgtgcattattggaagtttccagccgtgatgcttataagctgacagccagcgatttggggttttttctgggaccaagactgaatgccgctggtcgccttgatgatatgtccattggcgtcacgttattgctcactgacgacatagcaaaggcgcgtcagatagcttgtgaattggacagtcttaaccagactcggcgtgaaatagagcagggaatgcagcaggaagcactgcaaatctgtgacaaacttgaacgtaccagcactgaactgccttatgggctagcgctctatcatccagaatggcatcaaggggtagtcggaattttggcttcccggattaaagagcgttttcatcggcctgttatcgcatttgcaccggccggtgacggtattttgaaaggttctggtcgttcagtgcagggattgcatatgcgggatgcgcttgagcggcttgatactttgcatccgggtttgatacttaaatttggtggtcatgcaatggcggccggtttgtcacttgaacaggataaattcgaacaatttcagtatcacttttctacgctaatggcggattggttagatatttcgcaacttgaaggtgttatctggagtgatggtgaattagcaattaatgaactgtcattggacattgcagaaatgttgcgtgatggcggtccttggggtcaggcattcccggaaccaatttttgacggtaaattcaaactactgcaacagcgcattgttggagagcgccatttaaaagtgatagtagagccattaaacggtgggccgatgctggatggtattgcgttcaatatcgatcctacccgctggcccgataacagtgtccgcgaagtagaacttgcctataaactggatgttaatgaatttcgtggcaaccgtaatgtacagcttttgatccaacatctctggccctattaaccgtttgatcggcaggtagtcagtcattgtcacgtactctcgtatgaatacgtgacaaatctgttgaagtgctataaaccctgtgccgaatccgttacaatacgcggttcgaaaattatccatttatctacgactacataacgtaagacacgaaaatatgtttgaaattaatccggtaaaaaaccacattcaggacctgtctgagcggacaacggttctgagggggtatctttgactacgatgtcaaaaaagagcgcttagaagaagttaatgctgaattagaacagcctgatgtttggaatgaaccggagcgggcacaggctttgggtaaagaacgctcctcattagaagagattgtcgaaacaattgatcagcttgagcagggactggaagatgtacaaggtttactggaactggcagtagaagctgacgatgaagagacttttaatgaagctgtggtagagctggagcagcttgaagaaaaattgggtcagttagaatttcgccgtatgttttctggtgagtacgacagtgctgactgttatcttgatttgcaggcaggctctggtggcaccgaggctcaagattgggcaagtatgctgatgcgtatgtatctgcgttgggctgaatccaaaggctttaaaacggaaatcattgaagaatcagatggtgaagttgctggcttgaaatcagcgaccattaagatcatgggcgattatgcttatggttggttgcgtactgaaaccggtgttcaccgcttggtacgtaaaagcccatttgattctggtggtcgtcgccatacttcattcagttctgctttcatctatcccgaagtggatgatgatattgatattgaaattaatccggcagacttacgtattgatgtttatcgcgcgtctggtgcgggtggtcagcacgttaacaaaacagaatctgcggtgcgtattacccatattccaaccaacattgtgactcagtgtcagaatgatcgttctcagcataaaaacaaagaccaggcgatgaaacagctaaaagcgaagctgtatgaactggaaatgcagaaaaagaacgccaataaacaggaaatggaagagaataaatccgatattggttggggtagtcaaattcgctcttatgttctggatgactcacgcatcaaagacttgcgcaccggcgttgaaactcgcaatacacaatcggtgctggatggtgatctcgataaattcattgaagcaagcctgaaagctggcttatgaggaactaaaatgtcacaacaacaacagggtgcggaacaggcccccgatttaaataatgagctgcaaactcgccgcgaaaaacttgccgctttacgggagaatggaattgcattcccgaatgatttccgtcgtgaaaatatttcagaagatttgcacgcgaaatacgacgacaaaactcaggaagagctggaagcactgaatattgacgtgacggttggcggtcgtatgatgacgcgtcgcattatgggtaaggcttctttcgtaacgctacaggatatgggcggtcgtattcagttatatgttgcccgtgacgatctgccggaaggtatttataacgaacagtttaaaaaatgggatctgggagacattctgggggctcgtggcaaactgtttaaaaccaaaaccggtgaactttccattcactgtactgaactgcgcctgctgacaaaagcgctgcgtccattgccggataaattccacggcttggctgatcaggaaactcgctatcgccagcgttatctggatctgatcgccaacgaagaatcgcgcaaaactttccaaattcgctctcaagtcttattggccctgcgtagctttatggtcagtaaaggctttatggaagtggaaacacccatgatgcaggtaatccctggtggtgcggcggctcgtccatttattactcaccataatgcgctggatattgatatgtatctgcgtattgcgccggaactttacctgaaacgtctggttgttggtggttttgaacgtgtctttgaaattaaccgcaacttccgtaacgaaggcgtatctccgcgccataaccctgagttcaccatgatggaactctacatggcctatgcggattacaaagatctgattgtcctgatagaagagctattccgtacactgacgcagaatattttggggaatactctggttaaatatggtgagcaggaattcgatttcggtaaaccatttgcccaaatgaccatgaaagaggccatttgcaaatatcgtcctgaaaccaacatagctgatttggatgatatggataaggtggtggctatcgctgaatctcttggtattgaagtggaaaaaggttggggccttggtcgtgttcagtgtgaaatttttgaagaaacggcggaaagccacctgattcaaccgacatttatcactgaatatccggcagaagtttctccgctagcgcgtcgtaatgatgcaaatccgtttatcactgaccgttttgaattctttattggtggacgtgagattggtaatggcttctcggaattgaatgatgccgaagatcaggcggaacgttttgctgagcaggttcgtcagaaagacgaaggtgatgacgaagccatgttctacgatgaagattatgtaacggctttggaacacggtatgccgccaaccgccggtttgggcattggtattgaccgtatgataatgttgttgacagatagccataccatccgtgatgttattctgttcccggcaatgcgcccgcagaaataaccgtttgaattaaatttcaaattcaaactcctctatagcatagctgtcaggggagtttttattttcaactgcctgaaatatagacaacttaagcagataatggcttgctgatgctaacgaagtcgctataataatttatgttatccttaagcgagcgtagttcaatggcagaacgagagcttcccaagctctatacgagggttcgattcccttcgctcgctccagttttgtattctttctagaaaatgctgtcgcattgaaaatataccttttgatatgatgtaaattaaatcaaaagaatttacgtataataatcgatataaattaataactaactcattgtctaatatgaaaagaatcccgttattaaatcaaccccgaatcagctaggcgtgatgtatttttgaatgcggatacatcaccatagaaagcattctatggtaaatgaataattaatagagacagactatttaccatgaaagaaaaacattggtcaaaaattcaattcctacatgaagctgtaactaatcagagtattgtcatcaaaggaacccatagctattatagcgattgctggagtggcggttttgaagaatctgtcgttcgctatttatacggtgataaaatcagtcttcaatgggagtctaagtggccaattgataaattgtatattggcgattatgtttgcataggtgctgaaactatcattcttatgggtggaaataatacgcacagagcggattggttctgtttatatccattcatggaatacatcgaagaggcatacgtaggcaaaggtgacacgcatattcatgatggcgtatggcttggcatgcgttcaatgattatgcctggcgttactattggtgaaggcgctatcgttgctgctaatagcgttgtcactaaagatgttgagccatatagtattgttgctggaacgcctgctaaattagttaaatatcgctttgcgccgcacattatcaatgagctacttgcgttaaaaatatatgattggtcagaagagaaatttaatgctttaaaaccctatctctgtgcttcggatattagggcattaaaatctgctgtaagatcatattaagagaaacagttaattaattccgtaaaataattaattaggcttgattcgattaattaagtgtattttttaaaaatgttctattgctgaattatttaaccgaagttcattaattgttagcttaaataccgtttcggcattcaagccgcaaacggtatttatttaatattccttcaatataaaagaaaatatgctactatcctcttatgaaaagaaaaaatacaccgacgccacatgatgctatttttaaaaagtttttaagtcatattgatactgccagggattttctagagatacacttacctgccacattacgggcagtttgtgatcttgatacactgcgactggaatcggggtcatttattgaggacaatctgcgggtacattattccgacatcttgtattcactaaaaactacgcagggtgagagttatgtgtattgtgtgattgaacatcagagttccccggataagatgatggcattccggctgatgcgttacagtatttcagccatgcaatggcatttggagcagggacataaaaaattgccgctggtcattccagtgttgttttatcacggaaaaatacggccatatccgtggagtaccaactggttcgattgcttcgatgcttcggctctggcagaagagatctattccagcgcgtttccgttggtagatgtgacggtaatcccggatgatgaaatcctgacgcacaaacgagttgcactactggaaatagtacaaaaacatatccggcaacgtgatatggcggagttacagcaagagctgaccatgttgtttgcgtatgattattatacatatgagctgctaaaaagcatgctaaactacatattactggtgggagataccgccgatccagaaggttttatccggcaactggcagaacagttcccgaagtatgaggaggtactgatgacaatagcgcagaagttgcaacataaaggacatcaagaagggcttaaggaagggcttcaaaaatgtcaagacgcacgcgaagaagggcttcaagaaggattacagaaaggtgaaaaaaaaggtgaaaagaaaggtgaaaagaaaggtgaagagaaaggtgaaaaacgggcgagtctgaaaatcgcgcgtgcattgatggataatggtatcgatcgtgaaacgataatgaaaagtacagggttgagccagaacgaacttgaacaaatacatcactgattcgtgctgagagccgtaatcggtatttaaagattcgtgttagaagaggggcttgtccagcgagtaacgggaccgccccctagaaatatgaggaggtaattggtgacaatagcgcaaaaactggagcagaaagcgttccaagaaggatatcaagaagcatgccgaaaagcatgccgaaaagcatatcgagaagcatatcgagaaggatacagaaaaggattacagataggtagaaaactggcgcttgtgaaaatcgtgtatgcaatgatagacaatggtatagaccatgaaacgataattaaaatcattgtgatgagccggaataagattgaacaaatagccgattaacttatgctgacactttattggcatgaaaattcgtgtaaataagtgggcaaaactttacatagaagcggtatattatttggataagtttgaaatcatactttttctgtcgggtattaagctttttaattgaaatagtatttgaataattaaagaatattcctcaaatagaatattcgaaacatcgtaatccgataaattttctcttggaagcggcaaccggattggttgcctataccgtttaatctaaaaaaacaaatctggatttatgcacctatgaattagtcgttcttggaacagaaagtattgccgttattggtaaacgatcgatcgctgaaataaatctgtttaagttgttggcaaagctaaaacagattaattaagccatcatacgaaaatagattcagtagatatctgatattcttttggcgcttttaattaagatttctttgtaatcaggcgtctgtttttccacattggaaaatatagcttgaagagtggcatgagttatttctttgtcggcgaattctggcatgccgctattgaacgggggttctgggctatattgcatcgctagttggactgcttgggcatattcttcacctttgatttcagcaagcaatgttaaaccgaaatcaatacctgcggtgactccacctcctgtgacccggtttctatcgataacgactcttttattaaccggtattgcatcgaatttgttgagatcgtctatcatcgaccaatgagtcgccgcttgatacccttttagcaagcctgcggcccctaacaggatagatcctgtacacacgctggtgacccaagatgctttacttcccactttatgtatccaatcaagcatgtctaattcggcaagcaaagcataaggatttcctgtaccgggaacacacaaaatatccactttatttaattgctcaaatgtagtgctcggtgaaaatgatatatgtgccagctcagtacgcaccggaagtaaatcgcgccagacatattcaatatttaaccatcctcccactccaagaactgtcgcgggaccaatcatatcaagtggtgtcatgcctgggaaaatgacaaaagcgagagtgggtttttctccagatgatgcatttattaacgaagataatgccgcaggatgttccttagatgtgtttttcatggagaagttttccttattgagattgagattgagaagtgaactgaaattcatatgctgctatttttagcgatcgctgaacatctgtattcccggtagtaaattgatatacccgtcatctttcaagttgcctctttgttggctgcactcgctcaccccgatcacatagtttgctatgctcccggggattcactcctttgccgtcgcgatgcatcttgaaatccatagggtatggaataactgtaaccgttaactaattggcgtatatgccaatattgcgacgatttacgccaagtgccataattgccttatgaacattaaaactctctattttctgatcttccccaatgtcaatttgctggacctttcagggccattgcaggtctttaccacagctaatgagctagcagagaagtttggtcacagacggccctacgctataaaagttgtggcttgtgatcccggacaggtaatgacgcaggctggaataactgtgcaggcagaacctctacctaagttggattctcccgccgatactctgattgttgcagggggcattggcgttgagtcagcggcgaaccatccgccattgcgtaattggttaaagggacatgcgtcgctggctaggcgtattgtgtctgtatgcagtggggcattcattctggctgcttgcgggttgcttgatggccgtagagtcgttacacactggagtagctgtgccgaactggcccggcgttacagtaaattgcgggtagaatgtgatcctatctttattcaggatggtccggtgtggacttctgctggtgtcaccgccggaatcgacttggctctagcattgctggaggaagatttcggtcataaactggcgctggatgttgcgcgggatctcgttatgtttctcaaacgtcccggtggacaggaacagtttagtgctccactggcattgcaaagcagtacgagtaaatttgcagatctgcacgcttggatgactaacaatttggcgggagatctttcagtggcaactttggccactcgtgccaatatgagtgagcgtagctttgtacgtcactacagccaacatgcagggattacgccagccaaagcggtggagcgattccgcttagaagcggcgcgtcatcttttggttgaatctactctgtcgctcaagtgcatagcctcccgttgcggtttcggctgtgaagatactttacgccgtagtttcttccgggcgttcagtagcactccacaggactaccgtaagcacttcaagacgacattttagctatttattctctttattctctttctcttgctatctccttcttcaatcgtcgccataacgtagtacggctaatccccagatattccgcggttgcatggtgattgccagaaaaccgtttcaaggtttcatgaactgaaagtggtacaacaagtgaagattgttgaattgaagaaggggaagacttcatactttgttccgcctgcttgagtatagattggcgttccggtgaaagcgccaatatcaattctggtgttaagatatgctctggatgagcactgaggtataacgtgagccgttccataagattacgtagttcccggacattgccgggccaatgataggcttgcaatgcctcctgacaggtagcaagctcttgcactcttgattgtgataccggcaaatttaatgcagcaaatgctcgtcgcagatattccagcgctaatataccaatatcgtgacctctttctctgagggctggaatgttgatccgcaatacactcagacgatagaacaagtctgttcgaaaacgcccgtcttgaacccaggtatccaaatcgcaatgtgtggcgcaaattatccgaacatcaacagcaatggggcggtgtcctcctactctgacaacggatttttcttccaatacccgcaatagccgtgtttgaaggggcagtggcatctcaccaatttcatccaaaaatagcgtgcctcgatgtgcaacttcaaaaagacccgcacgccctccacgtcgtgaaccggtgaaagccccttcctcataaccaaacaattcagcttccaatagggattcagcaatggcaccgcagttaacggcgacaaacggacgttgatgtttacccgcaacctgaccataccgcagggcatattcatggtgaatggcttgtgctactagctccttccctgtgccactttccccctgtatcagcactgtggcaggcgaacgggcatatagcataatagtgttgcgcacatgttccatcactgctgaatctccccggatatcattgagagtatggcgggtacgtaaattgttctcggttggataggcagaaattgaagcttggctgagcgtggtcattctggcgatatccagtgcatcatggaatgcctggcgaatagaatcagcagagtagacaaaaacacctaccaattcagcctcataggcgaggtcggtaattaacccggcaccgacaatcactttaatgccaatggcttttagtgcattgacttgggcccgtgcatcttcttccgttacgtaactgcgttgttcaatacgcaggttgaaccgttgttgaaattcttctagcgcaggtaatgtattttgataggtgataacaccaatacgggagctgatttgtcgtgcacgggccaatgcttgcataaaatcaaatccactggctttggcaataataacgggcactgacaaacgacttttaagataagctccgttggaaccggcacagagcacggcatcacaacattcagttgttaaccgttgacgaatatgctgaaccgcattttcaaacccaagttggataggtgtgatattggcctgatgatcgaactctggtgtgatatcacggaagagatcaaaaagacgggaaacagagactgtccaaatgaccggtttatcacggttatcacgttctgctgatggtgtttctgccatgctattccctatctgtacgctttgtacgctgttttcgtttttcttagctgaactttattcgcttttcccaccacaataattcaatgtttcgcaattgtttcattcatgtttcatgaaacgtaattgattcattatggaacagatgagtttttctatcaatggtactttcctacaagctaataaatatttttagtgctattttttaatttaaaaacaatcatatatatttttatggtgtttgttttttaaagtcattagctattttttactttattggtacgtatgttgctaggtaacaaatgtgtttcattataataacaatgaggtcttatatgactctttcctctgccggtttggcatttcgtcgggctatagacgctgagtccccgttacaggttgtcggtaccattaatgcgaatcatgcgttgctggcaaaacgggcgggctataaagctatctatctttctggtggcggtgtatcggcgggttcattgggtatgcctgatctgggaatttcaacgctggatgatgtgttaacagatattcatcgtattacggacgtatgcgatttgccattgttggtggatgcggatatcggttttggttcttctgcctttaatgtggctcgcactgtgcgttccatgattaaagcgggagcggcggggctgcatattgaagatcaggttggtgcgaagcgctgcggtcatcgtccgaataaagagattgtatccaaagaggaaatggttgatcgcatcaaggccgctgtcgatgcccgtactgataagcattttatcattatggctcgtactgatgctttggctgttgaaggatttgcagcggcccttgatcgggcaaaagcctatatcgaagctggggcagacatgctgtttcctgaggcgatcaccgaattacatatgtataaagcatttgcgtcaacaaccggggttcctgtattagccaatataactgaatttggggcgactccacttttcacaactgaagagttgaaaagtgcggatgtctctattgcgctttacccactttctgctttccgtgcgatgaataaggccgccgagcaggtttacatcacacttcgccgcgaagggacacagaagagtgtgatcagcatgatgcagactcgcaacgagttatacgaaagcatcaactactacgattttgaacaaaaactggatctgcttttctcccagaaaaaatctcaatgacggacatccccacctaatttcgtcgttttatatggcataaaaaccgtagaggtgatacccatgagcgaacagaacacgatgactgagttaaccactttcaagcctaaaaaatctgtagccctttctggcgtcagtgcgggtaacacggcactttgtaccgttggaaaaaccggtaatgatctccactaccgtggttacgatattcttgatcttgcaacccagtgtgaattcgaagaagttgcatacctattggtccacgaaaaattgccttctcgtgctgaattggctgcctataaagcgaaattaaccgcactgcgaggtctgccgggtagcgtaaaggcagcactggaaacattacccgccgccgcccatcctatggatgttatgcgtactggagtctccgttctgggttgtacattgcctgagaaagacgatcacaacctcgcgggagcgcgtgatattgctgacagattactagcctctctcagctccatattgctctattggtatcactatagccacaatgggcggcgcattgaggtggaaactgatgatgtgtcgataggcgggcattttctgcacctcctgcatggtaaaaaaacctgtgaatcgtgggaaaaggccatgcatacctccctaatcctttatgcggaacacgaatttaatgcctcgacatttaccagtcgggttattgcaggaacgggtacggatatctactccgccatcatcggggcgattggtgcactgagagggccaaaacacggtggagcaaacgaagtctcttttgaaattcaacagcgctatgaaaatcctgatgaagcagagcgtgatattctggcgcgtttggcgagaaaagaggtcattattggctttggtcatccggtttacactatttctgatccccgtcacaaagtgattaaagatgtggccctgcaactttctaaagaggcaggaaccaccaaaatgtttaatattgcggatcgactagaagcggtgatgtgggccaacaaaaaaatgttcccgaatcttgattggttctcagcggtttcctatcacatgatgggcgtgccaacggcgatgtttacaccgttgtttgtgattgcccgcacagcggggtgggctgctcacatcattgaacagcgtattgataacaaaattattcgcccttcagccgactataccgggccagaaaatcgagtatttacgccaataggtaaacgtgggtaacgctatttttgatgcagagattcctgcatgagtgttttttaacaaggaattattatgtctacctctgttgcaagcaatcatcctgaatatgatcaggttattgcggatattgtggattatgttatggaatacgccatcacatcatccgtcgcctatgaaacggcttattactgttttctggatacgttgggttgtgggttagaggcactggaatacccggcctgcaagaaattactagggccgattgtgccggggacagtggtccctaatggcgtgcgggtgccgggaacccagtttcaactcgatccggtacaggcggcatttaacattggtacgatgatccgctggctagattttaatgacacatggcttgccgctgaatgggggcatccatccgataacctcggtggcatcttagcagtggctgactggctatcaagaaatgccgttgctggtgggaaaaagccgcttacgatcaaagatgttttgacggggatggttaaagcgcatgaaattcagggatgtcttgcactggagaatgcattcaataaagtcggtttagatcatgtcgtgctggtaaaagtggcttcgaccgctgttgttgctgaaatgttgggattgaatcgggaagagatcttgagcgcggtatcgctagcttgggttgatggtcaatcattgcgaacttaccgtcatgctcccaatactggctcacgtaaatcttgggctgccggtgatgcaacatcccgcgcggttcgcttggctttgatggcgcaaaagggtgaaatgggatatccctcggtattaactgcaaaaacgtggggattctatgatgtcctgttcaatggtcagccttttaaattccagcgtgcctatggcgcttatgtgatggaaaacgtgctgttcaagatcgctttcccggcagaatttcatgcgcaaactgcggtggaagcggcgatcagtctgcatcaacaattgaaagacgccggtaagactatcaatgacattacaaaaatcactattcgtacccatgaagcttgtatacggattatcgataaacaaagcccgttaaataatcctgcggaccgagaccactgtattcagtacatggtggcgattcctttaatctttggtcgtcttactgcggcggattatgaagatagcgttgcggcagatcctcgcattgatgcactgcgggaaaagatagtatgtattgaagatctggattttacccgtgattatcacgatccggaaaaacgttctattgctaacgcattaactgttacgtttacagatggcagccagctcgatgaagtcaaagttgaattccccatcggccatgctcgtcgccgtaaggaaggcattccattattgctgaaaaaatttagaaccaacctggcacgtcagttccctgaaacgcaacagaggagaatcctgtctgtttcccttgactgctcgttgttagaaagcatgccggtaaacgaatacctcgacttatacgttatctgaatttccaatattatcggcggctgctctcccaaagtgccgctctatcatctacggcagaacataggagagattatgtcattcaacgctttttatcagcagtccattgatgatcccaacgctttctgggctgagcaggcgcaacgtattttctggcaacatccttttgagcaagtgctggattatagcaatcctccttttgctcgttggttttgcgggggaaaaaccaacctatgctacaacgcgttggatcgctggctggaaagccagcctgatgctaaggcgctcatcactatctcaacagaaaccaatagtgagaaagtatttactttcaaagaattacatcaggaagtgaatcgagcggctgccatgatgctctctctgggcgttaaaaaaggcgacagagttttggtttatatgccgatgattgccgaagcattgtttgttttgctcgcttgtgcccgtattggtgccgttcactctgttgtctttggtggttttgcttctcagagccttgccacacggttggataatgctgaaccggtgttggtggtatctgctgatgggggagcgcgtggtggaaaaattattccttacaagccattgttagatgaagccatcgaactggcgaaccacaaaccccgccatgtattgatggttaatcgtggattggcagaaatggtttgggtaccggggagagatatcgatttcgcgacattgcggcagaagtactttgatgctgacattcccgtaacctggcttgaatcaaatgaaacctcctgtgtgctctatacttccggtacgacgggcacgccaaagggcgtgcagcgtgatgttggcggttatgctgtcgcattggcaacatctatggatatcatttttggtggtaaagcgggtgaggtattttttagcacctcagatattggctggatcgtcgggcattcttatattgcctatgctcctttaattgcaggaatggcgacgattatgtatgaggggctaccgatacggccagatgcgggtatttggtggaaaatagtggagaaatatcaagtaacgcggatgttttcagcgcctacagctattcgtgtactgaaaaaatatccaattgaatgtattggtaaatacgatatttcatcacttaagacattgtatttggcgggagaaccgcttgatgaacataccgcccgctggattgctgaggctatcaacgtccctgtcattgataattattggcagactgagaccggttggccaattatggctatcgcccgtacgctggatgaccggccgagtcgatttggcagtaccggcttcccgatgtatggctttcatgtcaagctcatcaatgaactgactggagaggcgtgtggtgataacgaaaaaggtatgctcgtgattgaaggacctttgccaccgggttgtattcaaactatctatggtgatgatacccgttttatcaatacctattggcgacactttgagcatgctgtttattccacattcgattggggtatccgtgatagtgacggctattattttattttggggcgttcggatgatgtgattaatgtggccgggcatcgtctgggaacgcgggagatagaagagtgtattgccagccatgaagatgttgccgaagtggctgtgattggtattaaggatgccatcaaggggcaagtcgcggttgcttttgctgtcctcaaggatgggaaggagatccagaatgccgagcattttgctgctttggaaaaggttttgatggggttggtcaataaacagattggtagtgtgggccgcccggcacggatttattttgtctctcagcttcccaagacgcgttcaggaaaaatgctacgtcgaaccatgcaggcaatatgtgaagggcgtgaacctggcgatctttccttgattgaaaatcctgcctcattagacgtcattcgagaagctgttttttgctaactgattaatatttattatgtttaatgagggggtgataagaaaatccgaactcttactgtcgctaaatgcataatagactctgttgtggttggcgtgtatatacccgtcccatagggtatataacgtctgctaattaactcccaaggataaataagagcaatgcttgtatgagttcgctgtttatttctggagggcaaataacggtagccaacttgttctatatatggtttaagttctgtaccagcagaaatagttttatcaattgatgttgacaggtaaaagcgattgttgtttagaggttcctgagatcgaaagcaggtaaggtttctttataatatattaaatttttctatttatttgattggtgtttgacttttatctgtgttaatgttcagtttatgttaacgttcattttattatctaaacataaaaaattgttataagctatgttttgctttcacatgggttggctagttattatttttcagcagtatattgaagcagagaattaaatattacgacgttaattgcctgtaatttaatcaagtgtataactgtagtagatttagctatattactattgaaaaaaatagatattaggaatatacagaactctgtgattagaaaaacattatacccaatagatttcaagatgcatcgcgacggcaagggagcgaatccccgggagcataggtaactatgtgactggggtgagggagtgcagccaacaaagaggcaacttgaaagatgacggatatatattaatgcaaatctttgcgacctgttatgaaataaaaaataccggtaacaatttcgaattataggtaataattactagtaacaattgtaggtaattattacggataacaattataggtagtggaaatagatttttttagaaaaatagatgagtgaataaaatagtgatgtgatgaagtgtgcttcaaacctgtatgtatcgggagaggctttagggttgtatggtatataccctatggatttcaagatgcatcgcggcggcaagggagagaatccccgggagcatagataactatgtgaccggggtgagcgagtgcagccaacaaagaagcaacttgaaagatgacgggtataaatcaatctggcttttatctggattactgtggagttattatggaaatagatgaaatatttaataattatgagtctaaagctcgctcatattgccgtagatttcccgtaatatttagaaatggtataggttctaccttaatcgatatagatggtaaaagttacattgattttttatgtggcgctggtgcgttgaactatggacataataatacaatcataaaacaacagattttcaagtatattcaagatgatggtattattatggggcttgatttgtactcggaagcaaagatggagtttatatcgacatttgttgataagattttgaaaccgagacagcttgaatatcgtttacaatttaccagtcctacgggcacgagtgtcattgaatctgcggtaaaattagcaagaaagtatacaaaaagagaaaatattgtttgttttaccaacgcctttcacggtatgaccggagtgtcgctgagtttaaccggtagtcaacatcaccgccaacctgggttatattctcaaattacgcgcttaccatttgatggctatatcgacggagaatttgattatatagggtattttagaaagctacttactgattccagttcaggggttgatcttcccgctgcggtaattcttgagactgtacaaggagaaggcggattaaatgttgcttctgttgaatggttgagagcgttgagaaaacttacccaagaattcaacattctattaatcgttgatgatattcaatctggctgtggtcgtaccgggacattctttagttttgagcgtgcaagtattaaacctgacttagtttgtctttctaaatctattggcggtattgggctacctatgtctttattgcttatttctcccgatatcgatgtgtggaaaccggcggaagacaacggcacatttcgaggtaataacttagcatttgttgcttcaaaagcgatgttaaatgaatattggggcgatagctcttttcagaagataattgagcataaggctgaattaattcgagcgtacttggactctttggctaaagagtaccatgaatttgtactgcgagttaaggggattggattcatgcaaggtatagaaatggttgattcctcattaacacaatatttggtgaagcattgctttgaaaatggtttgattgtggagttgtgtggccccaatgatgaagtgttgaaattgatgcctgccttgactattgatgaagacacacttgtaaaaggattgaggattatagaacaggctctcgccagtttaaaatcgagaaatagtaataactgcgaaagtgaatttcaaagggtatcggctagcagcaattattagctaggagtgtagaattatgagccgtgtagtagaacttactaagtttaatcagcttgaatttcatcacacacttgctcggggatacgcaattgtttaccgaggtttattgcaagactggccagcgataaggcaatggaattctgaatactttcaagataagtttcctcaaattgatgttgtgatcaaattttttgatgcaaatggtgtgcgttttgagcaagccaagatgtatcgttatttagaaattctgcatgcatataaaaaaggagagatgggtaataatattccctattgtcatgacatccctatctttttacaagctcagcagttacttaatgacgttagtgattttccgctaactattttgccaaagctttatcgaaatgaatggtggaaatttgttcaattttttatgtctccagccggcgctataacgccactgcattttgatactttaagaacaaacaatctattttttcagataaaaggaagtaaaagattctcttttattccttgggaagaaagagcggcctgttctcgtcgagggtggcgctggtttgagtataatccagagattcaggatgttggtgagatagctaacataaacaaatccacgattgaggtgcatcaaggcgatatattaatcatgccggcgggtatgcttcatcatgtaagaacgttgactgatagcatttcttttaatatcgattttcatactcgatcttcagcccttgtaagttttaagagcattaaagaaaaaatgccgcgtgaaaatttgtattacaattggctaagtttatgtgggcttttgggattaatgaagcgcgaaagttttttcgagaagtaccgcccgtatcttaattatatttcttaaaaagtaagtaggttaattatgaaagtatcgttgattgatgtcgataaagacaactatgaggatgtgatgtctcttgaagtcgaacctggacaagaaggtttcgtcgcgccaaattcagagtcaattgtcgaatcacattttaatgaatattgtaggccaagagtgatctgttttggcgaggaaatagttggttttgcaatgtatgagcgttgcgttaatgaaggaaaacccaacgaatataatctgtatcgaatgatgattgataaatcttaccaaaacagaggtattggaagttcggcgatgcagttattactggatgaaatgaaacagcagcctgattgttacaggattactgtctgttatgacgaaactagtgaacgccataaatcattttatcaacgttttggttttgtagaagtcggttattatgaagagtatgaggaaatgctggctgaaattattgtcaggggatgattttaatgagcttgtaaataataaaaactaaaaatgacatctttcaaagggattgtagtatgcttctagataaagttgaaccgcttgttattccactaaatcaacagcaaaaggaaatttatcttgatcatataaatagagaggataccgcagcgttcaatataggtggttatgttgagattaagcaatctattaatataaagaatctcgaatgcgccataaaacacactatccaagaacatgctgtgcttcgatgttcaatagtagataagtactcaatgccgcatcatattgattcggatgcgttaaaagatacagttgagtttgctcatattgttcaagaccatcactttgaactgtctcatttagatctttcgggtgaagaagaggcggaatctaaagccttggctattgttcaacggatattctctgagccatttagattagcacaggatgtgctttatcgagtcggcttaattcaattggcgacaaatcgtttctggttatactttatttctcaccacatcatcattgatggtgtcggttatgctaactggtttcgacgtattttcgacgcctaccagcaattgagtttgggaaatgcgcctaaagaaaacacgggagtgcggtttcttgatcttgctgcgcaaccgttaccggagaattatagtcagcaattcgcaaaggcagctaaatactggaaagagttgctccatcatttgcctgatgtgcctttccaatgtcggaaagaaggccctggaactgccgactcaaggaaaaatagcaggcttgtacactttatcaaacctgatagatataaatcatttttaaccaaggcgagtcaatgcaatttacccatatcgccactttttattacagctattgcttctttagtcaaccgtatcaaccaaagtgatggggttcttatcgggacgcctttacataatcgtactacatcagctcaacgcaatatggttggttcgtttatatcgatgctaccggtaatgtgcgtacaaaatgagcagatgtcggtggctgaatcagtggcaatgacagcacgtactataaaaagtggctatcgttatcgctcttatccttcgagtgccttatataaagatttgtctttacgtgctcaaggtcgtgaacgtctttttgatattgtttttaactatcaacagattgattttgatttcagtgctagtggcttggatacggagactcattaccttagtcatgggcgtgaagatattccgctcaccgttatattatgtgattacggtgataagcaaagcactcagctccaactcgattatcgtcatgattatttctcgtcacatcaggctgaacatttattgcaaagcattatgactttggttgaacaaatggttgcacagcctgaagcgttattaacttcacttgatctggtgggtaaagacgttgaacaggcgttatggaatctaagtcaatctgttgtgacaggagaaaaacctgtctgtccgaccatcacattagtgcatgagcaaattgagcaatatgcaaaacggcatcctgatgccattgctatcgtggatggcgaacgacacatgtcttacgccacattgagcaataaagccaatcagttagctaactatttaattgagcagggggttcggcctgatagccgtgttgcgatttgcttgccgcgttcgagcgagatgatcgtggcgatgttggcgacgctgaaagccggagctgcttatgtaccgatggaccctgattatcccgatggtcgtttgcagtttatgctgaccgatgccaaacctgttgtttgcatcacagtgtcttccattgcacatcgattcgcagcatgcgagattacaacactattgcttgatgatgctcagcttaatgaacatttggctctgcgttctgtggcaaacatatctgccagcaatattggcttacagttggaacatctggcttatgtgatttatacctccggcacaacggggcagcccaaaggtgtgatggttgaacataagcagttgagtcattttgttgcccatatttcaaaggcttatagactgaccgaacatgataagtttttgcaattttcttcggtcagcttcgatatttctgtggaagaatgtttcggttccttatgtaacggcggcactctggtgttacgagctgatgatattcattacgattttgatgcattttgggcattttgccgacaccatgaaatttcggtgactagtttacctaccgctttttggcatcaactggtgaattacagtcgtcaacctattgagtcttcactacgtttagtgatcttaggtggcgaaatggttaaatccgttagtgctcgtgaatggttcgaacgtggcccggctatcgaactgatcaacacatatggtccgaccgaaacaacagtaaccgcgtctgcttactgcatgacatctttggctgatgtaacgacgatgattcccatcggtaaagccaattatggtacccaactttatatattagatacgaatttaaaaagtgttcccgcagggtttcaaggggagctatatattggtggaacaggtgtaacgcgtggttatcttaatcgtgagcaagatagcgcgaagtattttgtggctaatccttttggcccgggacgactttatcgcactggagatattgtacgtcagttatccaatggtaatttagagtttattgggcgtaatgataaccaagtaaaaataaacggttttcgtgttgagccagaagaaatcagcaatcaattaatggattatcccggcattcatgaagcagttgtctatccccgacaacttggctctgatgatcgactacaattaattgcttatattgttgctgaaggaaccatcaatattaatgctattcatctggcgatgaagagcaaactggctgattacatgttgcctgttgccgttgtgcagttagagaaattaccactgacacaaaacggcaagttagatttcaagcaattaccactaccacaaaaacaagattatagtcagcaggaatttgttgcccctgaaggcgaagccgaacgggtattagcgcaactatggcagtcgctattagccttgaataaagttagccgccacgacaatttttttgctctgggtggtcactctttattaattatgtcattgcgcgcagagctggctcagcgtggttatgagctgcctatgcgcgcgatttaccgaactaatacgctggcagaactggcattacatttatcttgtgtccgtaaggatgaggatacgttaacttaccgagaggtcgctgttaacaagcttgcagagcatgttgaacacatcacgcctgatatgttggatatggtgactttgagtgaaaaagagatcgcagttatttgccagcaagttgagggtggtgccggtaacatacaagatatttatccattatcacctttgcaggaaggcattttctttcaccatcgaatgaatggagagcacgatccttatattattccgattctgataaagttttctgatgagcaaaagttgacagcttttctccatgcgcttgataagatcgtagagcgtcatgatgttttccgtacttctattcattggcaggatttaaccacatcggttcaagtggtccatcgaacagcttctattccccttcattggcaagcggttattccaggtctttcggcgttggaaactgtgcaacaggcggcctttgaacgccattatatgaagctggatcgcgctcctatgatgcaggcgattgtggcgaaagggacagagagtggtgaatgttttctactattaaagcaacatcacttactaagtgatcatatttctgtcttattgcaaattgaagaaatgcaagcgttgcttgaagatccaaatgtggtattgccaacaccggttcaataccgtgagtttgttgctcattcattaaggattaaccaatctgacaaaggtgttgattactttaaagctaaattgtctgatgttgtggaaactacggccccttttggcttgttgaatgtttaccatgacgggttggaagtaaactctgccggagaattagttggcccgcatttagcgcaacagattattggtctggcaactcagcaacgtattagtactgcgaatatttttcatttggcttgggcattggttgttgctaaatgcagtggtaaagacgatgttgtttttggttccatgatgtcagggcgaatgcaggctattcatggaagtgatcgtattttgggtatgttgattaatttgctgcctatacgcataaatctgacaaatctgtcggtaagcgaagcattaacccagattagtgatgaactcattgaattggccgactacgaacattttccgctttccgaggcattacgttatagctccttaccaggcggtacacctttgtttaccagcctgttgaatttacgccataaaaataaattggcgattgccaaccaaagtcatcattttgaaatcatagaggctagagaatataccaactatccgttagagatgggagttgatcagcttgataatgatttcatgatgcaagttcatgttgagccgcaagtcggagcggctaatgttctgacatatatgagaacagcattggtggctattattaatgcgtttaaccaggctccgcaaacacccttgctgacattatccataacgcctattagcgaacagcagcggattattaacgaatttaacagccctgtcgctgcttatgataaaaccgtgacgattcatcaacgttttgaacatcaggtagtaaaaacacctgcggccattgctgctgtatgtaatacaaattacatcacttatgctgaacttaatcagcgcgctaatcagctcgctcactacttgatagaacaaggtgtggcacgaaatcatattgttgccatctatgccgaacgttccattgaatttgtcgttgccatacttggcattatgaaagccggtgctgcttatgttcctttggaccccaccaatccacttgaacgtttgtcatatatgttggctgactctggggttaatgtggttttaactcaacaccatttaaatggattaaccttcaatggtcagaagtattttctgttggatacggactggtcctcattaggggattatccaaacactaacccagaggttgagtgttatcctaatgaccttgcctatatgatttatacttccggctctactggcaaacctaaaggtgctttggtgcaccatgccggggcgttgaatcatattgatgctgaatttgatgttcttggttttatggatagtgataatcagctattaccacgtaactttttacaaagtgcagcctcttcttccgatgtctctgtatggcaatttctagcacctttgatgagtggtgggaaaacagtcattctgcctaatgctatggatttgccagaatatgtgcgtgtattgcaaaacgaacagattcatctgattcaaaccgcaccttcggtattgaaaatattattggaacactttcttaataaaggcggaatatcaataccattaccagatctgaaatggttaatgattatagctgaaccttgcccggtgcctttggttaaccgctggttgcaaaattatcctcaaattccggtgatgaatggctacgggcccagtgaggcatctgatgatattacctattttattattgatgagccgttaacagagcaggttaaaaatattcctgtaggtaagccattgccgaatttaaccatgtatgttttggatcaacgtatgcagattctgcctaccaatgttgttggtgaattgtgcgtatctggtatcggtgtaggaaaaggttattggaataatcctgaaaaaacggcagaaagttttaaagataatccttttcacacaatgggagggcatggaaccagactttatcgtactggggatttaggctactggcgggcggatgggaatctggaactcgtcgggcgtattgataatcaagtaaaaattcggggtttccgtgttgagctgggagaagtcgaatcggctttggtgaaattacctcaggttatggaagcggcggttctcgtccataaagacagagtgggggaaaattgtctggtagcttatttggtattagctgccaatgtcgttcagatacagcaatccattaacgatatcaaacaggggttaagttatcatttacccgattatatgatccccggctactatgaaattttaaccaggatgccattgaatgctgcggataaaattaatcgccatgaattgcctaagccttgtttcgttaatcatcattctaagtggattgggccggctaacgcgcttgaacaatcgttagctgaaatctggcaatcagtgctcaatgttgaccaaatcgatcgtaacgacaactttttccatctcggaggccactctttgttggttatccgggttatttctaaaatacgcgcagaacttgggcatgatattgctgttaaagcgattttcgatcatccaacattgatcgaacttgcagcaatgcttaaacaacagacgactaaaactgttgttgattcaattcagaaacagcccaggaccgatgagttactgcctttgtcatttgctcaagaacgtttgtggatccttagccaaattgatcaaagtagtgcggaatacaatatgcccattgcatttgctgttaagggcaaatttgacgttagtgcagccgaacgggcattgaatcagatcatcgaacgccatgaaatattacgtacggtttacattaagaaagagggcaacccattccagaaagttttatcaggcaggaaactgacactcaattatatcgacttaatctatatgtccaaagagcaacaggatcggcatgttgctgaattaatgatagaagatgtcaaccggatctttgacttaagtagcgatttaatgatccgcgctacttttattcagtgtcaagtcaataacggagtattactgtttaatgctcatcatattgcgtctgacggctggtctgaggatattcttatccgtgagtttgttgcccgttatgaggctatacgcaacgggaaccatttcgaaatagaagaacttgatattcaatatgctgattttgcaatttggcagcgtaacagattgcaaggtgaatatttagagtcccaaatctgctattggaaacagcaattgagtgaactcccgccggtacatggtgtaccgctggacaagccaagacctaaggtcaggcagtatcaaggggccgtggtaacaagcatattgccggaagagactacgcgtgcgcttgttagtttggctagacggcaccaaatgacgccgttcatgctatttcacgccgcattggcattagtgctgtctcgtcatagtagtagccatgatattgtgataggtacaccggtagcgaaccgtttgcaggcagagctggagacgcttattggcttctttgtcaataccttgatactacgggtagataccagacatagtgcattgagtgattatcttacccacgtcaagcaagtgcatctggatgctcaggataatcaggatgtgccatttgagcagttggttgagcggttgttggtaaccagaagcacggcgtatacgccattgttccaaatcatgttgacgatgaatacggactatggtctgaatcatgacattagtacaacagcttttaacctgccagaagtagaactgagtgcaatagcaccaaaccatatcctggctcagtttgatctcgatcttgagctgagtatcagtgatcaagggttgcttatgcactggacttatgacaccagtttatttagccatgaacatattgaacagctaaatgaccatttgtcgcgtttactgagtggactggttaatgtggcggagaatgtggcggagacggatgattttacctctatctcacttgctaatctgcccatattgtcagacacagaaaccgaatacttgctgcataccctcaatgatactcatgcaaattatcctaagaacaagtgtatccacgaattgtttgaacagcaggccgaggaaaaccccaataacattgcgttagaatttggcgacagccagttgacctaccagcagctcaatgaaaaagccaatcagttggcgtattacttgctggagcaccatgctatccagcctgatacacccgtggggctatgtgtggaacgttctttggagatggttataggtatgctggcgattcttaaggctggtggtgcttatgtgccgttgtctccagaatgtcttgaagaacgtctggtctgcattttggaggatacacagcttaatgtggttctactccagtcatgtttgcagcaagtactgccagatttcagcggtcaacgggtcatattggataatctcagcaatatagacggtcaaaccagcacggtatacagccactatcctattgccaatccgaatagacattcactgggattgactgccaaccatttggcttatgtgatttacaccgcgggatcgaagggtagacctaaaggggtaatgattgagcatggtaatacagttgccatgctcagttgggctcaatcacaatacacaaaagaagacatagcctgtgttctcgcgtcgacctcccttaactttgatttatcagtatttgaactatttttacctttagtttcgggtacacgtgtatgtattgttgagaacataatcgctttatatgaaggaattgaccatgaagtcactttaataaatacagtaccttcaacaatgagctatctggttgatcaaaatgcgataccgagtagcacccgggtaattaatttggtgggtgaagctttatctgcaaatctggtcaatgaaatatatgaaaaaaataaagatgtagtggtctataacttatatggactaccagaggatacgacttattctacttgggcgaagttggattcctccataaatgctacaccgactattggtcgaataattaataatagccaggcttatattctggacaaagagcatcaactggtaccttatggttcaattggggagctttatgtcggcggtgctagtctagctcgcggttatttcaatcgcatagaattgacaaaggaacgctttgttacaaacccatttcatgatcccaacacccccaacagtagtgagcggttattcagaaccggcgatttagtgcgttatctgccagacggcaatctggagtttattggccgtattgatgttcaggtgaaaattcgtggtttcaggatagaactgggtgaaattgagtatcaactcaaccgacaaacaggggtgagttcgtctctggtattggctgaggcaacatcaacgggtgataagcaattagttgcctatgtcaaaccggtgttgggaaaattaaaattgatgtctgaaatgaatgatgcggaaaagcagcgggctcaaacccaatttattcaggacatcaaatccacactggctaaatctttgccggactacatgatgccgtcagtcattgttatggctgaagaatggtctctgccctccaatggtaagatcgatcgcaaggtattgtctgaacttaatattgaacatggtaagaatgatgattttgttgaaccgattggtgaaacagaaaccttattagctgaaatttggcaggaagtactgaacattagccaggtatcgcgtaacgataactttttcgcaataggcggtcattcattattggcaatcaaattaatctctgaaatcaatagcgtattcgtcattgaactcagtgttatgcaggtttttcatacacccagcctgtgtgagcttgcagaattaatctgcaaccagcaattacaagaaaaaatcaaaagagagttagtcacagcaggagaagaggggtggttatgatggatatgctgaaattagtccaagatgcttacgagcagggagtattgctgtttagtaaagatggtaagttagggttcaaacttaagggcactcacttcccagatgaactgaaagccaagattcaggcacataaagcggcactgattacgtttctcgatgaaggtaaggtggatgcttctggcaataaaatcgcgattaaaccagcgcctagaacccaaccattacctttaagttcctctcagcagcgtatttggtttatcgaccagtttggtggtgacagcactgcctacaacatggtgtcagcttatacggtaagcggcaaatttgaactggcggcagcgaatctggctctgcaaaccattatcgatcgacacgaagtgctgcgtacagtttacctcagcgatgaaaatggaacccggcaggttatcaaaccggagtggtcgttcgagatagtccaatcagatatcagtgatatagagcaagcccagcaggaagcgtggattgagcaggccattcaggatgaaatggcctgccagtttgatttgtcaaaagatatgatggtgcgttgccgttacatcagcatctcggcggagcagggggtgctgttatttaacatgcatcatatcgcctcggatggttggtcgataggggtattggttaaggaatttgtaagcttgtatcaggcttatcgtcaggggcaggctaacccattatcggctttggagattcagtatgccgattatgcggtctggcagagtagcccagagagacaggctcagctagcggcagggttagcctattggcagcaacagttgtcggatttacccccggtacacggcttgcctctggattacgggcgaccagctaaccaaaccagtcatggccgcagttatgaatttagtctgaacaatgaggttagtaagaggttgcagcaactggcactgacgcagggctgtactctttttatggtgttacatgcggcgtttacggtgttactcagtcgtcatagcgggcaacgagatattgtggtgggaaccccggtagctaaccgtttgcagatatcattaacgccgttgataggctgtttcatgaatacgctggtgttgcgcagcgagtgtgggctggagcaatcgtttattgattacttgagctcggttcgggagataaatctggctgcccagcggcatcaaaatgtcccgtttgagttgttggtggagcggttgcagccggaacgcagcacccgttattcaccgttattccaaatcatgttttctatgaatacgaatgacagcgtggagttgcaactggaagggataagtttgcggccacggccggaacagacccgcaatgcgatgtatgaattgacgttagaggcccagcagacagaggaaggtctgatttttagtttcgagtacaacacggatttgtttgcagaggagacaataaagcggctggcggcgcgttttacaaccttgctgatgggcatagtggcctctccgtctgaaaagcttggcgatttggccctgttgccgccggaagagcaggattacctgttgcaccatttgaaccagacagcggtagagtatgaccgtagccgatgtattcatgagtggatagaggcgtttgctgaacaaacgccggatgctattgcgttggtctttggtgaccaaaagctgacttatgcgcaacttaatgccagagccaatcagttagcacatcaattaagagctcagggagtttcaacgagtgggcgagttgctgtgttgttgcaaagaagcatcgacatgatcaccgcactattggccgtgatgaaagcaggagctgcgtatgtaccggttgatcccagctttcctgtcgacagagtgcagtacatgctgaacgatgcagagccacaatgtattataagcaaccgcgaatatgcatcacgatcagttggttttgcggaattaacctgcttactggatcacattgaccttagccaatcacccaccacaaatattcctaaacagtcgatcggtttagctgcatctgctctggcctacgtgatttacacttcgggttctacgggcaagcccaaaggtgttatggtcagccactcggcggttaataacttcttgatctcaatgcaagataacttgcagtgtgtggcacaggacaatattttagccatcacgacgatttcctttgatattgcagtgttagagctctatctgccttggctgtctggtgctacctgcgtcgtagcggcgcagcaggacgtgactgatcctgccaggctagttgcactactcgaacaacatagtatttcgttgttacaagccacgccaacgacctggaatatgttgcttgaatccggctggcaggggcgctcgtcgttaaaaatgatcagtggtggcgaggcgttgccattagcgacagcaacggcattattgagcaaaggcagcgcgctctggaatatgtacggaccgacggaaaccacggtttggtcaaccattgcgaaactggacgtacaactgcttgagcagcaacttgttactattgggttaccgttaaacaacaccacaatttatttacttgatgaacaattaaaaccggtgccttttggggcagtgggagagttatacatcggcggtgatgggcttgctgaaggctattttaaacgagaagatctgactactgagcgattgattaacctgacattttctgacggtttaaccgctaaggtttataaaacgggcgatcttgcccgttacactaccgagggttcactggtctatttgggcagaaatgattaccaagtgaaattacgaggccaccgaattgaacttggtgaaattgaacaggttattaacctgtttccacaaataacccgttctgtggtggttgcgctaaacgatcagcaaacacaacagtatctagcgggttatgtggtcgccgagcagcaaattgatattgatgcgctacgtcaacaccttgaacagaagttaccagcctatatgttgcctcgggcaattattcagctcgaaacattgccacttacactaaataacaagattgatcgcaaagcgcttccaacaccgcaagacagcgatattgctgttaaagccagtacgccacctatcggtgagacagaagcagcactggcagctatttggtgcgaaatgctagatattgagcgaataggccgggatgacaacttttttatggttggtggccactcattaattgcgactaaggtaatcacaaagattaatgagcagtttgaatgccgtttacaggtaagagatatctttgaagctgcaacagtagctttacttgcagagagagtgccttatgcggcatgggataagcgttatcagacaattcctattattgaacgcaagaccaatttattaccgcaatcttatgctcaacaacggatctggtttatcgagcagtttggcggtgatagcaccgcctacaacatggtgtcagcctatacggtaagcggtaaatttgaactggcggcagcgaatctggccctgcaaaccatcatagatagacatgaagtgctgcgtactgtttaccacagtgatgaaaatggaacctggcaggttatcaagccggagtggtcatttgagatagctcagtctgatatcagtgacataggcaaagccgggcaagaagcgtggattgaacaggctattcagcatgaaatgacctaccgatttgatttggcacaggatgtgatggtgcgttgtcactacatcagcacttcgatggagcaaggtgtgctgttatttaacatgcatcatatcgcctctgatggttggtcaatgggggtactggttaaagaatttgtgagtttgtaccaggcttatcgtcaaggtcggactaacccgttaccggcgctggagattcagtatgccgattatgcagtttggcaacacagcgcagcagaagaatctcagttagcagcaggggtagcctattggcagcaacagttatcggatttacccccggtacacgggttgcctctggattacgcgcgaccagccaaccaaaccagtcatggccgcagttatgaatttagtctggacaatgaggttagcaaagggttgcagcaactggcgctgacacaagggtgcactctttttatggtgttgcatgcggcatttacgatactgctcagtcgtcacagcgggcaacgagatattgtggtgggaaccccgatagctaaccgtttgcagacatcattaacgccgttgataggctgttttatcaatacgctggtattgcgcagcgagtgtgagctggagcaatcgtttatcgattatctgagatcggtccgggaggtaaaccttgctgcccagcggcatcaaaatgtcccgtttgagttattagtggagcggttgcaaccggaacgtagcacccgttattcaccgttgttccaaatcatgttttctatgaatacgaatgacagtgtggagctgcaattagaaggggtaagtttgtggccgaggccagaacagacccgcaatgcgatgtatgaattgacactggatgccagccaaacagaggacggcctgacttttaatttcgagtacaacacggatttgtttgcagaggagacgataaagcggctggtggtacgttttaccaccttgttgatgagcatagtggctgctccgtccgaaaagcttggcaatttggatctattgccgccggaagagcgggattacctgctgcacagcttgaaccagacagcggtagaatatgaccgtagccaatgtatccatgagcggatagaagcgtttgctgaacaaacgccggatgccattgcattggtctttggtgaccagcagttgacttatgcgcaacttaatgccaaagccaatcagttggcacattatttagttgctcagggcgccaaaccggattcaatgattgcgatatgtattgaacgcagtattgacatggttgtgtcggtacttgccattttgaaatcaggtagtgcttatttgcctcttgatcctgcctatccgcaagaaaggcttgcttatattattgatgatgcacagcctttgatggtgataaccaatagccataaccagaagttattgcctgaaaatagtctatttagcattgatgtgacgacaacctcgtttgccgagctctcaaccgataatattcccgccgttgaattgggtttatgttctacccacttggcctatgttctctatacctcgggttctacaggcatgccgaaaggtgtgatgattgaacatcaggcattggtgaatctggtagtggggcttgcagatgcctatctttattcaaaacaggatcgggtattgcaatttgccgccctcagttttgatatgtctatcgaagagatatttggtgctcttggtaatggcagtactttagtcttacgtggcgaagattggttgatggatattgccactttctggcaaaggtgccgggaataccagatcagtgcggtaaatttgccaaccacgttctggcacgaagtggtcagtgaagagacggttttagtacctgagcatattcgccaaatcagtgtcggaggcgagcagattaagccagataaagtggttgcatggtaccagcgaccagggcatttaccccgtttagtcaatgcctatgggccaaccgaatacacggtcaatacttgtattgcctacgatcttcggggagacaccctcagtatcgggcacccaatccaaaatacggccatcttcttgttggacaaaaaccagcagcttgtgccttttggtgctgtcggggaaatttgtgtcgcgggtgacggcgttgcgcggggctatatcaacaaagagcaattaacccgtgagcgatttattgataatccttttgtaagccgctatccaaagctctaccgaaccggcgatttggggcgttactcactggccggggatattcaatattacgggcgtgatgaccatcaggttaagatccgtggattccgcattgagttaggggagatagaaacaaggttgcgtagcttgcctacaattcgtgatgcggttgtcattgctcgggaagatgaaccggctcacaagtatctggcggcctatatcacccttgatggtcagcagaaagttgctgagattcgacacctattaagtcagcaattaccgagctatatggtccccgccgcttttgtggtgctagaggagataccgcttaccgccaaccgtaaagtggatcgtaaagcgctccctaaaccagattttgttattcagggggaaattgaatatatcgcgccggccactgaacaggagacattgctagctgaaatttggcgaacactgtttggattggcgcaagtcagtgctgttgccaacttctttgagttgggtggacactcattgttgagcatgaagatgctatcccatcttaaaaaacagggttatcgcttggatattcgggccttgtttgagtacccgaaattacgggatatggcgaaacaactacaggcaatcgaacaggaatcactgaaactaacagcccatgaagccttggaaagtagggtttccctgtcggaaactgagcgggccttgatcgtatctcagtcgccgggaggtgagcaaaatattgctggcatttatcctttggcaccattacaggaagggatcttattccatcacatgatgtgtgggcgatctgatctttatgtgacgccgatgctgtattcatttccgtcaaataccgagatggaaagttttattggcgcattggataaaatagtacagaggcatgatgcgctgcgaaccggaattttttggcaaggtattgatgaaccagtgcagattgcctacaaagaggtaccattaccggtagttgatatcgatttgagggatgatgttgatatccagcagcagctagcacagtttatggatccatcacaacaatggatggatgttactcaggcaccgttgatcagagtaacccggtttatcgaccgtcagcaaaagcagttctatgcaatggtgcaggagcatcacctgataagtgatcatgtgtcattggagattattcaagaagagttgctggttatcttggcaggtgatgaaaagtcactgccggaggcgttgagttatcgggattttgtcttaaacgccatcagcaaaaccgataccaaagcggcgcagcagttttttaccgagcaattggccgggattgatgaaatcacggcaccctttggtattaccagtggaatggttgacaataacttattcactgaaatccaaattggcttgcctgcggatttatccgcacagattcgtcggtcctcttctgcatggaggataagcccagcgcttatttttcacatggcatgggcattggttttggcaaaaaccagcggcactaaagatgtcatattcggcactgtattatctggtcgcttgcagggtattgataatgttgagcgagtcgttggtttattcatcaataccttgccactgcgtattgatttgagccagttgagtgttgctcagttaatgcaggaaatgcaacagaaactggttagcttgctgcaattcgagcaagtcccgacggcgattgctgaacagtgtagcaaattggccggttctagccgtttattcgacagtatcttgaattaccgtcattccgaagtgagtggcgagacaagtgagcttaaccaacgttggcaaaaaaccggcattgagttagttgatgtaaaagagcgtaccaattacccgattaccctatccattgacgattttggtgatgattttgctgttgcagcccaaatcgacagccgatttgatgctgaacgcttggtggcgtatctcatcaatgctagcaggcaacttgttgctgctttacaaagtcaggaacaggttgccgcactgtcactcgacatccttgatgctgaggagcgggcgttcctgctgcattcgttaaatcaaacggaatttccgtatgacaactcacaaactctgattgatagattcgaagcccaggttaaggcgactcctgatgagattgcgttgaattttgctggcgagacgatgacgtatcgtgagttaaatcagcgaaccaatcaactcgcgcagtatctcgtgaaccagggagcgaaagtgaatactcccgtcgtgatgttcattgaacgctcctttgagatggtcatcactattatcgctatcttaaaaaccggtgctggttatgtgccactggatacctcattaccgacagaacgcttaaacatcattctgagtgatctgtctgatgaaatcttagtaacgacctgcgccttgaatgacaggattgcggtaaaacgccagaaaatggtgttattggatgacccttgcacagcagagatcttgggcaaacagctaatcagtaatttggctatcgaatcctctctggataacctcggttacgtgctctatacctcaggttcaacgggtaagcctaaggcgattgaaatgccgcagcgggcgctgagcaatttattacaaggtataagccagcttgagccagcgcttacggggccgaaccgttggttacaattctcatcaattggttttgatctcagttttgaagacatattcatgccgctgttatctgggggttcagtacagcttattgataaatcgactcagttggatattcggctgttagcgaagcaaatccagcaggcgcaacttcaagtgctgaacttaccttatgctgtattgcagaatctggctgaatatagcggtgtcaatgggctacagttccccgaattaagggtgattgtgtcgagcgcggaaaggctcaaaatcacggcggccatcagacagtttttcacgacacatcgtcactgtaagttagtgaaccactatggcccggcagaaactcatgtcgtaacgtctaaaacattacagggagaacctgcttcatggccggatttgccgacaattggccgatcattgcccaacgtggccggttatattttggatgagtatttacagcctgttccgatgggtgccatcggcgaactgtatttagcgggggactgtttatcaagaggctattatcagcagccccagcttaccgcagagcgttatcttgattgtgattgggttcttgggaaacgagtgtatcgaaccggggacttagccagctttcatcaaaacggtgaaatcaactactttggccgcaacgaccatctggtcaagatccgtggattcagaattgaactcggtgatatcgaagcccaattgagtaagttcgatggaataaccggaaccgtagtcattgctattgatacagaagccggtgataagcagcttatcgcttattttatcgcggctaacccgttggatttatccgaaattaaaacctatttatcggctagcttacctgattacatgttgccatccgcgtatgtacggatggcggcttttccgctgaataccaatggcaaagtggatcgcagccgacttccacaacctgaagcagataactttgtaaaagccaaatacatcgcgccagtgactgaactggaacgaagtgttgcgaaaatttggcaggggttgttgcaacaagacagggtaagcatggccgacagcttttttgatttaggtggtcattccttattagctatgaagctaatttctcgaattgaacaggcattttccgttggcgtaccgattgcgatcgtgtttgagcgatcaagattagaacagttatgtgattggcttgaaaaagaaatggttattcaacgtaacaagtcaattggggctgtagtggcagaatatgaggtaaccgagtggtgattatgaacctaaaaggctttattgatagattgtccgagcaggaagttcgtctttttgttgaaaatggggcgctaaaatctcagtctgctccgggtgccatcacacctgaacagggaaaatttattaaacaaaacaaacaagcaattattgattttctctctcatacagaggtggcggggcaacagaagttttcgttattacaacgtcggcaccttaccaaggcaccattatcctttgcccagcgccgtttttggctggtcgaacaggtttctacagttgaacgtcagtataagatttcaactgcattcaatttatatggtcaattttccttggaagccgcgagtcaggcgatagatgccattcttaagcgacatgaaattttacgaacggtttatcaggaatcacagggcacgcccgcacaagtcgtgttgaacgactatgttttccagattgacaaagacacccttgccgatggtgttgaccaacagcaacacatagaggattggctggagaggcagagacagaggaaatttgatttaagtagggatttaccgctaagagtggcctatttggcctctgatctaaaaccagatacctcagataagccgttgaccggcgtattgttttttgatttgcaccatattgctgctgatggctggtcgctggcgatattagttgatgaatttacccttctttatcaacaaattgtgcagggtaaacccgccttactgactgagcttgaattgcaatactcggattatgcttactggcagaatcaagctgaaactcagcaaatgtttgacgagcagttgcaatattggcaacaacagttggctaacctgccattggttcatgaattgccgttagattatgctcgcccgcaaaaattggatatgcgtagcgcaatgcacacgcaaaagataccaatggagacggtgagtaaacttaagcgattagctgtagatgcaaatgccactttattcatgttgttgcataccgcttttgcggtgatgctggctcgctacagtgataacccggatgtggttattgggacacctattacaagtcggccggtacagaaactggagtcgctcattggctgtttcctcaatacgctcgtattgcgtttggattgtacaccgacgctgacattcaatgcgttgttgaacaatgcaaggcaggtgcaccttgatgcacagagcaatcaggccattccattcgaattattggtcgagaaattgctcgctgaacaaagcaccgcgtttactcccttattccaagtgcttttctcaatgcaaaattatgaatctcaaccgttggaacttgctgatgttgaatttaaagagcttatggaacaagggggacaaacgcagtttgatttgaccttaaccgcagcagaagatcaggatgggctgtcgctgatttttgagtttaatcaagggctttttaattcggacaccatcgcccgttttgccgaaaatatgcagttgttgttggcacatattgcggtcaacggtgataggccaattaatcaattggcgattgtcagtgagcaggaacaagctgtgttggacaaatctcatcaatcagcttggcaactgcctgaggtgcaaccttttgtgcatcagcttattcaacagcgggtggctgagtatcctgaacgagtggcaattcgctatcaggagcaaagcctcagttttgctgaacttgatgcaagggctaatcagatcgctcaattattgttgactaaaggtgctgacaacaacccgttggttgctattttgatggagcctggcattgactttgttgtcagcatgctagcgatattgaaagcaggatgtgcttatttgccattagatcccacttattctgtggcacggttaagttttatcttggctgacagccatgttggtttggttatcgtcgataacaagagtatcgataaggtcaatttaccagcggatagcgtttgcactatcttgcttgatgagactgaaattgccgcccagccccgtactgaaccgatgttgacctcaagtgtgacagcggattcccttgcctatgtcatttatacctcgggttcaacgggtaatcctaaaggggtgatgatccagcatggggcgttgagcgcatccactgctgggcggtttaattcatactcgatagtaccggagaaatttttactggtttcctcctttgctttcgattcatcgattccggcgatatattgggggcttggcagcggtgcaacgttgcatttaatggcccctcaagatgcgaaagatgcatcgtatgtggcgaagcttatagacagtcaacaaattagccacgttctttttattcccagtttctacgatgctgttcttgattaccttgtcgggccttcactacgtaaagtgatttgcgccggcgaaaatttgtcggacaacgtaaagacaaaacatttccagtgtcagcctcaggcaacgcttgtcaacgaatatgggccaacggaaaccacggtatggtcttcgttgaaaatctttgaaaaggcgacggagccagtcacgattggtcggcccgctccccatgtgtcacttcatgtgttggcaaaagatcgctcccaatgcccggtcggtgtagtaggagaactgtatgtcggtggtgtcggattagcaaaagggtacttgaaccgcccggaactgacggctgaacgttttattgatcatttggatgctaaaggtaaccgcgaacggctatatcgcaccggtgatttagtgaaagtgttgccatcaggcgaaattgcctacattggccgaaatgatttccaagtgaaattgcgcggttttcggctcgaattgggagaaattgagcactgtatccgcacgcattttgatgtcgcggatgttgtggtttgtgtgagacaggatgacaagcagcggcaatccttggtggcttatttggtggctccgtcgatgctcgacatacgagaacagcgcgataaagtcgagcgtatcttaccggagtttatgtggcccggcttctatgtgttattgccggaaatgccgctgactgagaatggcaaagttaatcgtaaagctctgcctgcgccaagcagggaaaatatcgctaaggagccttttacgtcaccagaaacggcaactgaaaagcagttagctggattgttccatagagagcttgggttgacgccaatcaatattgaggcccggtttgtacagctcggtattcactcactgcaatttgtcaaactcggtagtgccatcagcgaagaattaaagatcgaactgtccgtgaaggatttttacgtctatgacacgctgtttgctttagcgcagtatgttgagcagcagtttgccgaacgacagaaacagattgggggagaaagggaggttgttgaactgtgaatatcgccgcatttttagctgacttaaaacagcaagacattatggtataccttgaatctgactcgcttaagttaaacgcgcctaaaggcgcggtatcgcagaatatgctgactgagttgagaacgcataaggtagaaattattgcgtatctgcaagggcaacaatcaaatccattaccgatcaagaccgccgacagggaattgactcgattacctctctcttttgcacaacaacgcctgtggttcatcgaccagctctttggcagcagcgagcattacaatatggcgacggtgttggaagtaaatggcgagttcgatttaacgattgctgaaaaagtcatgcaacgaattgtcgaacgtcatgaaatattgcgctcggtttaccgagaagagcaaggagaagtatggcaggagattcagtcagcggttaaggcaaaaatcaatgttcggcatttgacatgtgaacctgccgagctgaaagcgatattttatcagtatgtttctgctccgtttgatttacagaaagatctgatgatccggatcgacttttttaccactaatactcagcggcaatttcttatcatcaacttgcaccatattgctggagacggattgtctttttctctcttgatggaagaatttgtcatccactaccaagagattaagcagaatctgccagaatctttgcctgtattacctgtgcaatatgcagattatgcttacactcagcagtcatggattgccgatggggtgtttgatgagcaacttgattattggcaacaaaaactagcggatataccgcaagttcaccaatttccattggatcttcagcggccggtgaaacagaccaactacggtgttaaggtgcgattccgattggatcggcaatcttcgtcgatgttgcgtaaacatgcgggcgatgccggtgcgactctgtttatgttattgcacgctgcattttcagtatttatcgctcgttacagccagcaaacggatattgtcattggtacaccggccactaaccgtaaacaaaaagagttacagtcactgatcgggttgtttgtcaatacgctggcgttgagaaccgaatatcagggcaaggttgatttcatgcagtttgtgcagcatgtaaagcaagtcaacattgaagcacaaatgaatcaggatttgccgtttgatgttcttgtggagaaattggcggtgagtcggaatatcgcttattcaccgatattccagttcatgttcacaatggatacgactgaggccggtgaatcgagactggatgacgtggtgtttacgccggtatcttcgggggaagcattctctaaatttgatttggaactcgatgcgattgatgacggtgacacgattctgtttgaagtggtgtacaacagtagcctattccatgaacacacgattgcaaggttactcaaatcgtttgaagtcttgttgattgatatcgccgaaaatccttataaaacattagactctttagcgttgttggatgaagacgaaaagcgtcgtttagggcaacaactggcgataccatcttctatcgcaacaacgacagaatctgtgcaatgccggtttgaacgtcaggcagcacaaagatccgatgcgacggctttggtatggcaggttgcaggcgaaacgcaaaccctgacatatcgcgaattaaaccagcgggccaaccgattggcgcatcacctaatcgaaaagggggttaggccgggcaatattgttgcgttatgtttgcctcgttcccctgagatgattgtcagtatattggctgtactgaaagccggtgccgcttacactcctattgacattgacaaccctcaatcccgaattaatcacattattacggattgtcagccggtagttgtgttgacgaacaacacatatgcagacaagtttgctgaactgaatgtcattgttgagctgttaacctcggaaatggaactgttttcagggactgcatcggatgatccgaatatcagccatagcttggatgagcttgcctatgtcatgtatacctccggatcaacgggcaaacctaaaggggtcatggtagagcatacgcagttgagccattttgtggcggcagcactggcaatgtatgccgttaaacctgacgacaacatattacagttctcctcatttgcatttgatatttccattgaagagtgttttgtcaccctatgtgcaggggccactttagtattgagggacgatgattggctcaacagcgctgacctattttggcaacagtgtggtcagcacaacatcactgtaatgagcttgcctaccgcattttggcatcaggtgagtagtggcgacgctttggtgcctgacacattacggttggttatcgttggcggtgaagccattaatgctgaaattgtcaggcattggttcgcatcagcaaaccgtcctccggtgatgaatacctacgggccgaccgaaacaaccgttttagcgagttactacttgattgaatccgcgttgcagattgagcagtcggttcccattggcagggtaggtggtcatgttaaagcctatgttgttgatgagcatttgaatttggtgccacaaggtgtcattggtgaattggttgttggtggtaaaggtgtctcccgaggttacttaaacagacctgaggagcagcagagaagttttatccaggttgcttttttcgacggtgaggttgagcggctttaccggaccggtgatctggtgaggtttaatgttcatggtgagattgaatatatcgggcgcaaggatagccagataaaaattcggggtttccgtattgagccaggtgagattgagaaccaacttattgcgattgatggggtgagacaggcggttgtcactgctgatgagattaacggtaacaaacaactgattgcatactacgttgctgatgtgccactggagccggccgcgctaaaggaacaaataagtcaaaccttacccgaatatatggtccctaatgcctttatttcgctagacagcattccaatgacggtaaacggtaaagttgactacaaagcgctattgagtgtagagacgcaagagccgttacccgagaactattgcctcccgcagggggaactggaggaacaactggctgatatgtggcagcaattgttaggccatcctaaagtgggtcgtaccgataactttttcaaactagggggacattccctgttggcgattaagttggtatcggaaatccagaaaaccttagctgtacagatctctgttcgggccgtctttgaaagccaaactttggctgaacttgcacaattgatcgttgaacaacggataacaactggcggtaatgcagcgatagcgccaattacacctgtcgctgaaatggcgcggcttccattgtcatttgcccagcaacggctttggtttattgaccagttagatgggcaaacgcctcaatataatatgccgttggcattaaccgtcaaaggggagttcaatctcgctatcgctgaacgtgcgataaacatcattgttcaacgccaccaagtgctgcgaacggtctatcggcatgataccgccggtgcatggcaggaggtgctggacaaggtaacggtgaagatcgaccgtattgactatcgaagccttggggaaaaaagcggccaacagcaggtgcaagaatttattcagcagcacgctgagcaaccatttgatttagcgaacgatgtcatgctgcgagcggcctatctaaagatagccgaagatcagtgcgttatggtcttcaacatgcaccatatcgcatcagatggttggtcaatcaaagtgcttgctgatgagtttgtcgacatataccgccaactgcttgaaggcattcagcaaccggctttgccatcgctagccattcaatataaagattatgcggtctggcaacggcaacaactacaaggtgaaacgttacaaacggatcttaattactggttaactcagcttaatgagttgcctcctgtacacgacttaccgttggatcattcacgtccattgcaacttggcagccgtggtgggctatttgaatttagtgctgacaagtctcttttgactgggctcaaatcgcttgccggtcaacataatacgagcctgtttgtggtattgcatgcggcatttaccctgttacttgcccgtcatggacaaagcccggatattgtcatcgggacgccggttgcgaatcgtttgcaggcggaagttgagccgcttatcggctttttcgtcaatatgctcgtgctgcgcacccaataccaagccgatctcacttttgctgaatatctatcgtatattcgtcaggtcaatattgatgctcaagcgcatcagttactgccgtttgaattgttggttgaaaaaatgcagccggagcggagtacaagttattcgccgctattccaaatcgtattctcgatggataccaatgaatctcaggtattgcaattgagcgacgttgaatttgagtcccttgatagcgaacatgtcacggcccagttcgatttgaccttagatgccggtgaaagtgagaacggtcttgattttagttttgaatacaactgtgaactgttcgaacggtcgacaataacccgattcagccaacggttcctgactttactgtctgcattagtgagtgagcaatatcaaacggctcctttgacgaaactgccggtgttaactgagcaggaaagacaatatctgttggtcgatattaatgacaactggcagtcttatccggttgataagtgcattcatcaattgttcgaagaacaggcggaacggagcccggaacaaacagcggttattgacggcgagcttcatctcacttatcggcaagtgaacgctcaagcgaatcaggtcgctcactttttgttggacaaagcttataccccggattcctttattgcggtttgtatggagcgaactgcggcttcggtgattaccgtacttggcatcttgaaggcgggtttagcctatgtgccatttgatgctgatcagccgttgcagcggattgaatacattcttcaagatagcggtgcgccattagttgtggttgatgatattcagtgtttgcctactgaggtggcttcggcgtacaacgtctggagattggatgaaatattaagccggtcacggcttaatacccatattgcggtgacgcagcgtcattcaaccgcgactaatttggcttacatgacttacacctcaggaacaacgggccatcccaagggcgtgatggttgagcacacggcgatgattgcgcgtttgtatggttgggatgcggtatttggtttatttcagcggccgccaaccgtattgcaaatggcgggtttggctgtggatatttttctgggtgatatcgttaagagcttgaccaccggtggccgcttggtgatttgtcgcaagtcggatttaattaccacagaggatttgtatcagcttatcgaacaacaacacgtgacatttggtgattttgtgccggtcattctgagaaatttacttgattatgctgaacaaaacagagttcgattgaattcactgcgccatatattagtgggttccgaagcttggtatggtcgtgatttgaaccgtttacaaaagctgatgcataccgatgcccgttgtttcaatatttatggacaaacagaatcggtgattgatgctagttacggtgatgtcacgcatctctgtttgcctgatgatgcctatgttcccatcggtacgccgtttgccaatacccacatttatatccttgatgcttatggcgagcctgtacctatgggggtagtgggtgaaattgcggtaggtggccccggtttggcaagaggttacaaccgcaatcgcgaattaacgcaacaaaaatttgttaaagacaacctttctggtcgttgtggttatatttatcacacgggtgatcaagcgagattaaaatttgatggaacgctggagtttttagggcgtaatgatgatcaaataaaactgcgaggattccgtattgaactggctgaaattgatgccaagcttcgtgcattgcctgatgtgcagaatgctattgctgtggtgcgggaaattgagccgggcaataaacaaattattgcttatcttcaaacgccacgaccgttattagttgaacggatcagagaacagctacggcatcaattacctcattacatgatccccagtgcatttgtctgtctgaatgctttctcggtgagtattaccggaaaagtggataaagaaaaactccctgtaccggaagccagtgcttttaccagtactgaatatgttgcgccacaaaatgacattgaaagaacattagcctctatttttgccgttgttttgaaacaggagaaagtgagtcgttacgataatttctttgctttggggggcgactcaatattaattgtgcgtgttgttgcgatggctaaacaggcgggtttggcactcagtgtaaaagatattttggcctatcaaagtattgatgaaataacgcagcagttacctgatttgaaccgcaacattgtctcttctaaagaggcttatcacgctttttcattactcacggatgacgaacgggcggcattgattgagcagtcaacattggatgatgcatattcattgtcaagtttgcaaatggggtctatttatcatcagctaaaagatgaaagttaccatattgtagagcattatttgattaatgccgtgtggagtgaacaagcatttcgtcaagcgtttaatgccatagtacaacgccatgagttattgcgtgcgacatacaacttcgaattagggagagcgttgcaatatattcataaaacgattgctttgccggttacactcaatgattggcgtcacctttctgtgcaggaatttgagcatcaattagaccattgtctggaacaggaaaatagccactttttcgttgaaaatgaattgatgtggcgagttaatgtatgtattgatgctaataatacatttgcactggttctatctcatcaacatgccattcttgacggttggagtgttgccaacctgcaagttgagtttatggaaaactatttatcggtgttgtctggcggttctattccaccaagagctgacttaccgcattacggtgaatacattgctgaggagctggcggctattgatgatcctgagcaaaaagcttattggcagcacattgccaatgctgcggtgttgcctgactggaccggaaaagcgtcaacacaacattattctgctcgccttgagttatcttatttacatgatgatttacaacaacttgctacgtgcttaaaagtaccgctgcgcaccttgttattggcaatccatgtttatgtcttggcgaaaatcaatggtactgactcgataaccagttcggtggtaagccatggaagacttgaagtgaagggagctgaatcttgtcttggattattcttaaatacgccgccggttaatgccgatatccatcaacaaacctgggcgtcgttgattcagcaattaaccgaatatagcactgcaagctggccttatcgatattatccggttgctgttatgcaagaggaattcaagtgtgattactctggcgctctgtttaactatgtcgattttcatgtgtctgatgagttacagacaacgcaagatgctgagcctgagcaggcttatgatcatgaatatgaacgagttgattatggttatgattttgtttgccatcatagttcagctaatcgttttctggttctgcaattagcgttgacccaatcggtatttggggcacatcaggcggggcaaatattagcctgttatgaaacggcgataaaatcgatgttagcttcacaacatcatcgcttggggcatgcggattatctggcatccggtcaaatccaacacttgtatcaattagcccataatgcctcatctattgctaatgattgcccatctgtgacgcaattatttgcccgaattgcgcgtcggatacctgatgaagtggccttgtcagggccttggggcagcatgaattatgctcagttggcgttagcggctgacaaactggcgacactccttattgcgcggggtatcggggtaaatgatacggtgggtatttatttatcccgtactcctgaggtagtgattagcgtcttggctattttgaaggcgaacgcgacatttgtaccattggcaaccgattatccaacagaacgtattgcccatattattaatgatgcggatattcagcttattgtttcacaacgttctgaaagccacactttgcctgttgatgaacaacgtattgttatggttgatgagattgactcggttgatactgcggttgtggcacgagaagtggcattatcagcgcaagagcgtgttgcttacatcatgtatacctcgggttcaacgggtacgccgaagggcattaagatcagccatcacaatttactgagctattatcaggcggttcaacgctgttatccggcaaattctgcccacgcggtattgcaaattgccaacattggttttgatatttttatcgaagaattaatgttgtcggtattttccggtggtcgtttggttctggataatcataaaacagcgtatagcgttaaacagttatgtcagatcattgatgcacaaaaagtcacactgatttcagtacccacagccttatggcatgagtggacgtatcagttaactgctgacgatgttgaacaactggttgagcatttgaaggtatgtatcgtcggtggtgaagccatgcgaatggagttattggcgctatggcaacaaaaaacacaaggaaagatccgtttattcaacacgtatggaccgacagaaacaaccattgtggcaaccgctattgatgtcacacaattcgataccttaacaaattcagtggtgccgataggacgtcctttggcccattgtcagacctatgttttggattctcagggtggattggtaccgccagatgttattggtgaactctacattgcgggtgatgctttaagtttaggctatgtgaataacccggaacaaaatgcggcacagtttgttgaaatggctatcttgccggaacaaacagtaggtttatataaaaccggtgatcgtgtttattggaataacgagggtgaactggtttatgtcggtcgtcttgataatcaggtcaagatcagaggttttcgtatcgaaacccgcgaaatagagtcagcattgtcagctattgatggtgtggcgacaagtattgtgcgggttactgtcgatgcaaccagcgaaaaacaactatgtgcctggctggtgatgccagaggggaccgaaacggatgctgtcatccccccgataagagagcaactgaaaacccgattaccagagtatatggtgccaaccctatatgctgtgatagccactataccaactacggctaatggtaaagtgaattttgctgccctacctgagccaaaaccttgcattacgcgaggattggatcgtgttgcggaaactgaaattgaaaaacagttggtacaactgtgtgccgacgcactgaaattaccgtcaagcatggtgagtttagccgcgtcttttatcgaattgggagggaactcattaaccttgttgaggtttttacatcagatacaacagacttttgctgtagtgataagcattgccgatgtcatgacggccactaatctggcagtactggcactgatgattgagcgtaaacagttgcaacaaactgaacaaagccatcagggatgtaacacggtggcggaagaaggctggttatgatgataaaaataggcgctgataaataaggtggaataatgcgagttattgatattattcggcaagcttcggctgcgggcgtgcagttatttgttgagcgcggcaaattgggttttaaagttatatcgggttatgtttttacccctgaactaaaagccttggtagtggcgaataaagctgaaattattgcttttttagcgccagatgaagccattaaattggtgtcattgggtactgatcaaacgccattatttttggttcctggtgctgattctttagcatcatcttttgttgatttggctgagaaaataaaaaccgatttttgccttaaggtatttgatgcaacctccctattattggggggtgaaacactttctgtcaaaacattggctgaacgttatgccgcattacttttgcaagcttatccacaagagcattatcgactggcgggttattgtgtgggagcatgtacagcctttgaggttgctttggtgctggaaagtgaagggaaaaccgttgacttgatggttattgagagttttcttaccgcctatgaccgacaaccttatacccatgaggagatcgatgatgtgagcaccaggttgattcaaggtattgaaggtgaagctctggatcgctttattgaggcttataaaatctactctattatggcttgcaattatgtaccatcggccaaattaaacggcaggatgacatttatttattgtgaaagctccatacaactacgggcagaaaaaaagaaaattattgcatcgttacaagattatgtcacacaaacgattacttatggcatggtaagcggtgatcattactcagtattaaaaccgggtgccgttgagactctggctgatgccatattattacagcattaccgaccagaaccctcatttaaaaaattgaacttaacctatcaggcgttgcttgacatggtgcaatatcgggccgatatttatcggcctataggtgatatcaatagctatcaccgggtagtgatatcgcaggtcggatgttggtttattgaaataacagatgagcgtgtacatattgatttcaatgctaataatacaatgtgtgcgcaatatgatttttatagtgagattgaaatcagtgtggacacattaatagcgtgcgcaaccagtgaggagccgtccgctgctattgctaaggcgatattggataataaaattcaggtacaacgaggagaaaatctttatcacttattatggattgtttttggcgtcacggaacctgatgagatttttgactggattgaacagcaagacagccaagatgagcatttaggtgttcaaacgaatggaaggacttttaacgataaatggcatattgattctcatatttgtactcgctatatgcctgctcattacagtgtgattcataaggcattaatgtctctaccgatcgaatacagtgactttcaatttatcgatttggggtgtgggagagggcgagctattatatgtgcatccagttacaactttagcaagattaccggagtagaaattgttgaatcattggcattaattgcacagcaaaatgttaacgcgataaagcaaaaaagtcatattgagataatacaagctgatgtaaacgactatcgatttaatgaaaaccatgtagttatttataactttgatagttttgttaatgatcaacttaagcaacttctacagtggttgaaaatcgatgtttatgataaaggttataaagtgttgattttacaaattaatggtgatgatgctatttatcaacactgtttttggttaacgccgaaaataattagccgaggttttatggggggatggaatatcactctgtggcaaagtgaaggttgttaaaatctggcgataataaaattttacttgggagttaatatcgatgatctctgatttggttaaagccaatcggttaaaaattatttttaatagtattgttggtgcttttagtgctttctttagtatttggttaatttccttgattaccgatgatgcattagaacagattagcgctgacttagtatcatggacagttaaattcttcatcgggcttgcctgcttgtttgttgtgagttcttttgctaattacttaatgacaaagttaagcgtcaaaattatttttgaagttcgtagtaccttagtgaaacgtatcttgaataccccttatgctattttggaacggattggcgggcataaagtccaggccagtttaacatctgatgtgagtgatatttccagagctatttctaccatgccgcagtttatttatcatgtgattacagtgattgcatgtttaggttttctggcattcaaatcgattgagctgtttatggtcacgttggtcactctcccgttagggcttttggtttcgcgttattttattagtaaagccgaagcttatgatgaggtatatcgtgatgattatgatagccttcatgaacagtttaaaagtctggtagatggagttaaagagcttaataataatgaaaagcgcaaacattcattttttaatcgaggtgttttaccatcattagaaaagattaatgactctgatcttaaatcagaaattttctggaaattgaatgaaaactgggggcaaatattattatttctggtgcttggatctattttattttctcacgttatgtgggagataggagaaagcaatgatattcttacctttatctttattatgacctttttgctgggccctgttgattttattttgtcctcacaggaaaccatagtaaaggcactcatatctctacgtaagattgatcgcttaaggttttctgaaaacttatcaatggagccaacattaaccaacacaggagagtttaaagaatggtctcgaatttccctgcgttccataagctttaaatatgccggtgaagggaattgtttttctgttgggccgattaatctggatattcagcgtggcgaaattatcattattaaaggcggtaatggcagtggtaaatcaacttttgctaaattgttgattggtctattgaataaatctgaaggtgatattttcatagatgataaggtggttaatgaagataatcgagagaattatctgaatatgtacagtgttattcattcagatttttatctatttgatacagtaattaatcgaaaaggtgaacttgccgatgatgaattaactcgtcaatatctgaaaaaattggatttagcagaaaaagtcacggttaaagatggtagattatccacaactaagctttctcatggtcaacgtaaacgcttagctctggttatctcttatatggaagatgcgcctatttatttgtttgatgaatgggcagccgatcaagatcctaattatagaagatttttctatcatgaattactttctgaaatgaagcgcaatggaaaaaccgtcatcgttattagccatgacgataaatattttcatatcgccgacagagttatcactatggataatggtttggtggataatattgaaataaacgtacaccccgataaagtagaaaatgctgctttagagtccgctatttctactatgtatacccaatagatttcaagttgcagtgcggcggcaagagaacgcatccccaggagcatagataactatgtgactggggtaagtgaacgcagccaacaaagcagcagcttgaaagatgaagggtatagttataatcgctcgtagatatcaggaggttataatgttagaactatttgaagatcaattggctggaattagagaaaaatatgggagtgattgtttaaaaagagtagaggatatgttttatcctttactacaacaaagagcgccattacaagcagatgccaagtatatcatgcccgggctttctaccacgccgtggttggatacgaattcttttccgcagttgcagccgttagtcacctcattgatgaataatgcggataaaataaaacaggaaattaacgcggttatcagcggtgagtcccaatatatcaccgattatgagcactatttgggaactcaaaaagattggaaggcattatatttatttaaaaatggtcagcctaataacgcggttgccaatattttgcccgctacgtggcatatttttaataatgaattaagggattggcattgtcctctgttggaagttcacttttcggtgttgcaaccaggtacggtgattaaaccgcattgtgatttatggaatttcactcttaatttacattttgcggtcgatattcctgctagccattgtgagatcattgttgccaatgaagccagatgttggaaagaaggtgaatgtttactgtttgattattcttatcagcatgaagcttataaccgctcagataaacataggatttgtttattaatggatatctggcatcccaatttatcatttgcagaacgggaagcattggttttgatcattaccggtattcgtaaacttttcggttagcttataccctacggatttcaagatgcatcgcgacggcaagggaacgaatccccgagcatagataacgatgtgaccggggtgagtgagtgcagccaacaaagaggcaacttgaaagataacgggtatatttttctagatatgggtgtgttgttggctattagcaacacagtttaaaaggatagcctttatgaatagaaagaggcaatacatggtgtctgatattcaggagtctaatgacttcgtttttgagcttgactcaacagagcagacatatttaaagcagcaatttttagagtctactctaaaatatgacattgataatttcgaggaattttattggaaatgtttttatcaatcgtttaatttgcctgtgcgtttacagaaaaagttatttgactttcgtgcattagaaaatgaaaattatttgctgataaaggggttgcctatccctgatgatctttgcttaacgcctttatcttatgaacaaacaaatagttctgaggtggcgggggttcgtactttgatatcaacgattttatctcgaattggatatatttattcgtttgttaataaaaagaactttaattttatcgatgatgtttttccaatggaaaaatataaggatatgcagttagggacaaacaaagagtttttagaatggcatgttgaagatggtttccatgatgcaaaagcggattgggttgctttatattgtctgcgtggcgataaaaatgctgaaacctacttgtttcaaacaaagaatattcatttggatgctgaaaccattgctgaattgcaaaaatcaaactttgagattgatgtcgatccaacctttgtatcgaatgtcagtggccgccgttgtgttgccgtattaagtcaacataaagaaccagaaatgatatttgatcccgcttatatgcgttgtttaacaccaaaggcagaagccgcgttggaaaagttgaatcagtgtattaatgaaaatagagaggcttttatattatctcctggagacatgttgctatttgataaccgtaaagttgctcatgcacgcagcgagtatgaacctcgatacgatggttatgatcgttggttactcagagcattaatattggaatcaaaattcaaagccagagattacttttatacaggtactttaagggcaaaataaaaatgacatcatttaaaacaatattatttaaaacaatatcatttaaatcaatcacattactgttgattaccttattaacaataagttgtagcggatttaaaagttattcagaaaagacgaagacagcatttgaagcgaaaattgttcgtactcattatggtgtccctcatatttatgcacacgacttgggaagcttgagttttggcaatgcctatgctcaggcacaagataatatatgcattatggcggatgattatgtgcgcattagaggggagcgtgcgcgtttctttggtgctgatagagataagcagggggactcactgaatttaattcaggacttcggttataaaacgttagctttggtggaacaggcgcgtgaaaaatggccgcaattaagtgctgattcacaggtaattattgatggatttgttgcaggttataatacctacctgtcccatgttaaggaagggcgttataccttaccaaaagcttgtcgagatcaagaatgggtagcacctattcaacgtgaggatgtattggcatatgtattttctattgcggtatttcctggttctgctcaatttcttgctgattattatgcggctgatcccaataaagaagatcaaaaacaattgtctttaaatatatctaggaataatggttattccattggttccaatggttgggcattaggccgtgacaaagttgaagaagtcaatggtatgttattggctaatccccattttccttatgaaggcaacatgcgtttttggcaggtgcatcatgtcatgaatggaaagattgatgttatgggagcgtctttaattggttttccgggtattattaatattggatttaatcacaacattgcctggactcacacttattcatcggctgaacatgtcattgtttataaaatgcaaactgctgctaacaatccgctcaattatgtgattgatggtgttattaaaccggtaatgtcgaagccaattcatattgaagtcaaaactgatagcggtattaaaacggtcacgaaagatcatttttatactgatattgggcccattattgaaaatgaagactttgcttggtccgagtctgaattttatgtcgtgaaagatgtcaatctttacaatcttgatatgattgatcattggttggcgttgaatcgagcggatagtcttgctgatgcaaaacaatcttataaagattttaatggtttggcttttaataacacgttgttaactggtaaagaaggcgttggtatttttattggtgataaagctgtaccggcattgtctcttgaagctattcaattattgaatgataacgaaactttggcggcagcacgtgagaagtatggcgtgactattttaccgggtaactcatcatccatgatttttaccgaagccttgggttatgatcagatcccacagctcgtggaaacatcctatgtacaaaattccaatgattctcactgggcaacgaacttggaacatttactcgaaggtttttccccacttctgggtaatgaacgaaaacccctgtcgttcagaactcgtatgggattgcaactaatacaggatgcggcgggtgataataagcgattttctctcatggagttagaacaggcgttattctctgagcgttcatatttagccgaactgatattaaaagatgtggttgccctatgtgataaaacacagaaccgattaattagattggtgaatggcatgaaggtcgatattactcaggcatgtcaattgctatcacaatggaacggtgaatttaatgcggatagtcggggcgctattatattccgtgaattagcttttttaattgatcagcaaaaacactttgccgtaccgtttgacatagcccacccggcaacaacgccacgccaattaaaacaaagtgaagagtttgtcaccttgttagcacgagcggttgccaatgtgaataatgtggggctggctttagatactccggtgagtaagtttcaatttattgaaagtaccgcacctgacggtaaaccggccgataatcgcatgagttggccggggttgtttggagaagaaggcggctttaataagatcgctgcatgggattgggatgaaaccctgtttcctaaacatcattatactgtgggtaatgatgtggtgactggtgaggcattggaatcggagctaactgatcaaggatatcatattcgttatggttctagttggataatgctggtggcatttgatcaacaagggcctaatgcgcgtgggttactcacttattcgcaatcttctgatattgattcgcctcattttgcagatcagagcagattttattctcattataaacagctattgccgttgccttatcggccaaaagagattaaacgatcaactatttcagaattggttatcaaacattaaattaagattgcttggtgccggttcacaagaaattttttgatgtttttaacataagcattataactggctggttgcttcagccagttatagaaaataccctatggattcaagatgcagccaacaaagaggcaacttgaaagatgatgggtaaatactatttattctttggaacgatataaatatgatggatttttctaattctggttatcagaaatgcgtagagttcaccatgccatccatagaggatgtgtttgcttgtatgataaatagagttccttttattattcgaggaggcgctgaacagtgggtagcaagaacaaagtggacatgggactattttcagcaaaaatttggtcatcatctgataaaagtatttcgatcatcaaataataaagataataaatatatgtctcttggtgactatattgattatataaaagatatggaagaacctgatccttattatgcctctgcgtggccgttttcgctctattttaaagaattggtgagtgattatgaggtccctgactatttttcttgcttaattcgtcagcgtgtttcagacaatattttgcataatgaagcggcattactattacttcgctggatttatatggggcctaaaaacagcggctctcgtatgcacttggacattgcttctactcatgcttggaatgcggtgatgagtggtcgaaaagagtgggtattttatgggccggaagaagcaatgaaaataggttatggcaacgttgatgcttttaaccctgatttggctttatatcccgatttcattcaggctcaaggtattcattgtatacagaatcctggtgatattgttttcacgccttgtacacactatcatcaagttaaaaatttggaggcaggaatttcaatcactgaaaattttattaatgacacgaacttggagctggttaagcattccataaacaacgacgatgatatatcaccggaacaagcaaattttattcggatgttaattcctgagttaagttaattcgaattctgcttaagccgtcactcccgaatagaaaaattcagtggcggtttctttttatttaaataataagtccacccaacacggttaataaatccctcttgccagaatatggtcgtgaacgttctaatattacgtctacgaccatgatatagtgtggaaaacccggcattattaataaattgatgtatttctgaaaggtttaatacttaaggttcagtgcgagaaaggaacaaccatatgggaagttgtctccgtgttcaaagagatgtatgactctgatgtctttcctgcacttactattaaaagtgacgaatgcggtaaaaggatagggcattgagtggtgaaatcgtttactggaatcattgtattctgttgtttccagatatcttgagctgcttacagcctgcaaagattgtatgattcggcacaatgcaattacaagaagttgttttctcttgcccgccagcatcttcaatgtcagaatcacagattaccggcaggtgattgatagtagcgtgctgattttcattaaaatcatgggacattagaaagttcgggagtattcaatagatcatgaatcgctcaacctactttaatttatgtgaagaaaagctttcatttctatgtactcgagtggagctacgtggaaagttgaacctactcgatttgcatcttcattgtgaagacttttacgttcatttttttaatctactctttgggtatgttttgaagaatgttaatcagtatactcacaatgctgaaggtatcgacttgattgactctgttcagaaagttgtgttacaggtttcttcgactgcgactaaacaaaaaattgagtctgctctgtcaaagaaccttacaacatatagggggtacagcttcaaattcatttctatctcagatgctagcgcattaagaagactttcctataagaaccctcattcattggtgtttgagcctatatttgacatacatgatgtcagatctctactagatcacattctccatttagatattgtcaaacagcaagcagtctatgaatttcttagcaaggagttgtcatcggtaggtgtgaagaatccacttactgaaacgaacattgctgctgtgataaatatattagcgaaagaaaatctttccgatatgccgagtgtggacaaaccgactccattcaatgttgatgaaaaattggtttttaacgatcttaatactgcggctatggttgttgaggattacaaaattcaccacggcagactaagccgtatttatgcagagtttgatgtggctggtcaaaataagagtaaatctgtccttgattcgttacgtaatagttacattaagttgtgtactacatattcagctgatgaactattctttaatatagttgatcgggctgtcacagtagtcaagcaaagtgctaattatgtatcaatgcccctggaagagctagaactttgcgtgaatgtcattgttgttgatgcattcattagatgccgtatttttaagaatcctaagggcatagaaaatgttgttgcctaaagacattcatcctactaatagcctttactttaatggagcttatgtgcttcaggctgtaagacagtataaagaggtcagtatgatggatctctttgtggagtctcgtaaattacgtgatattccgatgccgattttcgttttaacgttagattggttatttcttgcagatttggtttcatataacgatagcggaaatattgtaccatgttcctaaaatcactccgaatttccaactctgaaggtgtaatccgtcacattccttttcacgcgggcttaaatctcatcgtagatgagactctctcagggccagagcagactactgggaacaatgttggtaagacaacagtattaatgttgattgatttttgtttgggagcaaatggtaaaggaatttatactgacccagagaatcgcaaaagcgaatatgtgcttgttaagaattttctcattgacacagctgttttagttactcttactcttactgctgacttagataacccattcgctgaggagcttgttattgagaggaattttcttccacgtaagcaaattattcgccggatcaatggtcatcaaaaaactgctgacgaatttgaggcggcactcactgagcaactttttcctgggcatttcggtaaaaagccaactttcccacaaattatttctcataacatcagatatagagagttgagtgttataaatacgcttcgtaccttgagtgaatttactcgagatgatgaatatgaaactctttatttattcctcttgggatgtaattttgatcaaggcgataccaagcagaatctcctggcaagcattcgtatggagatgtcctttaagggtagacttgagtcgaagcaaacccgatctgcatatgaagcttctatggctttgctttctacagagattgctaaactaaatgaaaagaagtcggagttttatatcaaccctaattttgaaagtgatcttgagacacttgatgagattaaatataaaattaatgtatcgagttcagttattagtaggttaaaacttcgtcgaagtttgattgatgaagcaatcagagagataaattccagccatactgaaattgatactaatcaattaaaggcactctacggtgaggtaactgaacgtttgtcaggtgtacaaaagtcgtttgaggatttgttagaatttcataatcggatggtggatgagaaggcacgttatatagctaaagagattccagcacttgagcaggaattagttgttagggaaaataagctagcaagtttattaaatgaggagcagactttagccgcaaaaattagtaaaagcggctctttagaagaattggaatccttaattatagagttgaatgaaaagcaccgtcgaatgggggagtttgagacaattattgagcaaattctaactgttgatacaacccttagaaatttgaataaatctcttaatgaaattgatgaagaattattttcggcagattttgaatctgcaattcaaatgcagcttaataagttaaataagtacttttcctctatttctcaggaactttatggtgagcaatatgcattaaaggttgaccgaactactactcgaactgggcaaagaatatataaattcagttcattcaatacaaattttagttcgggtaagaagcagggagagattacctgtttcgatatagcctataccctttttgcggacaaagaggggattccatgctatcactttcttctaaacgataagaaggagctcatgcatgacaatcaactaacgaaaattgctatgttagttgagcgagaacataaacatgttcaatatgtggcttcaatcttgaaagacaagttaccgccagaacttaatcaagaaaagtacttcgttctcagactatctcaagatgataagttatttaggatagaatcaagcaattaaaatacttaagaaaaattggttagtttgagtttcgtctaagaagaacagtaagttactgaggcactattagttacttgcaaatagttctttgcaaataatgagtttgttaatgttaacaagcctgattagtttagaagagttttactgtaattataagaaatgaaagcacttagtaactgtaatgaacgtcagcatgttaggtagctgacagtaccttttagattgatggtaggtatactaaccatcaatctggggttctcattctttttgaacaatgaatgtgttgtagcgattcccctttttccaaaacaacctgttaatcattttggattgtttctaggtcatagtgttcttggttcaataaaacgaagagtattttataaaaacaacaaattttgtcgccaaagcgacattcctgcataaagtgttttaacatttggtcgttaaatacgtacaatcccgtccctgaatgtgttctctacagaataggcttagtttgtcgctgatccaattttacacatcgcggagtcgtctgccagcttggctcggtatattcgcgatactgatgttgttcattgcgccagtgatttcccggtcactggaacatgcgcgcagcattagtgaggctcattcatcgaaagtggtcgattgccatagggtgatgtcatctgacgatgatatacctcggaatatgtctcattctgacgtttcttccgcatcacatgttactaagttatatagtactaatagtactaaccatcatgatggcatgcagatgggtatgcatagtgttggtatgtcgatgttggaggatattgcctgtggatactgcgtttttctgatccatatacctatgctggatttggcgaatacaccgctattttggtcaacttcgctgacttcacggccaccaccgattcaaaccgtagcctcctttttgccgcatttcatcttttctgattcgttgcctcgtgctccgcctgaaccgatctcatctcattgatttaaacataatgaaatgtcctgctcattgttgagttaggaacagtttgttcataccaaaaatgatttggttggattctataacctattccgttgttgatagaaatatcactttggaaggtgggtttacatttaaggcaagatgatgatgttcgaaaaaaattctcctcataaaaaaaataggctatcccattgtatccgttcggccatgccactttttttgctagcgacttttaatggctatgcggctgaaaccgcagcggatgtacacgaccatgtaaagggtgcaaaaactaatgatggggatgtgattaccgtaacagcacctttgtattctcctttggcaattgttacctcgccaaaaacgcctcgtcagccggttccggcaagtgacggctctgattatttaaaaaccatccccggattttctcaaatccgtaatggtggcaccaatggcgacccagtatttcggggaatgtttggttcgaggattaagcttttgactgatggtgcagaaatgctaggagcttgtcccggcagaatggatgcgccttcatcctatatttcgccagaaagttatgatttgctgaccgtcattaaagggccccaaacggtattgtggggggctggcgcttcagcagggacggtaagatttgaacgtgaacatccgcgatttgatgagccgggagtcaaattcaatgccagtggattgacgggttcaaatgagcgttgggatggcaatgtggatgccagtattggcaatgaattgggatatttacgtttaatggcaaataaatcccgttcaaatgactacaaagatggtggtggatatcgcgttccttcacgttgggataaatggaatagtgatctggcgttagggtggacgccggataaagacacattgtttgagttcaccgcaggaaaaggggacggagaagcgcgttatgctggacgtagcatggacggttcgcaattcaaacgtgaaagtctcggtgtgcgttttgagaaatctaacctcggtgaggtgcttgataaggttgaagcccaagtttattacaactataccaaccatattatggacaatatcactttgcgttctccgaatagcgccatgtcaatggggatgtcttctgcgggttgtaaacatggatgtggtatgcacatgaatatgaaccacggtatgtcgatgcaactggatcgtcgtgttatcggggggcgagtcatgggcacctggctatggcaagacttcaaattggaaagtggcgcagatacgcaaaccaatacccatcgtaataaagcaggtaatgtatggcaaaaggatgctcaattctacaactatggcctatttagtgagctaacttggtatgccacagaacagagcgaattgataaccggtgcccgtcttgatcgcagccgagtaaagaaatttgcgggtaatagtgaaaaagagcgtaatgatactttaccgagtggttttatgcgcttagagcatactctggcggctatgccaatgatgttttatgccggtattggttacaccgaacgtttccctgactattgggaactgttctcgcctacctatggtccgacggggagtaccagtgcttttgatggggtaaaaagtgagaaaaccactcagcttgatattggtgcccaatataccggggaacgttttaatggttgggtatccgcctatgtagggtgtgtaagtgatttcattttatttagatatagcccgacaaacgcccgtattagccaggctgataatgttaatgccaatatcatgggcggagaaatgggctttggttatcaattgacagatcattggaaaacggatgccagcctagcctatgcttggggagaaaaccggacggataacaagccgatgcctcagatcccacctctggaagcccgcttcggcttgacctatgaacgtggtgattggagcagtacaggtttgtggcgattggtgagcagccagcatcggattgccgtggggcaggggaatgttgtcggcaaagattttcaagatagttccggtttcggcgtgctctctgccaatgttgcctataaggttaacaaagatataaaagtgagcgctggcattgacaatatcttggataaagaatatagcgaacaccttaaccttgccggtaatagcacctttggttattcagcgaatacctcagtgaatgaacccggccggacagtgtgggcgaaagtagatataaagttttaatgagaaagtggcacccaattattgggtgcccttttcctgatcgagaattatttcttattaccgatatacggataaacttttatataatcaatatcgaatgttgcggttgtttcatttatcgggccataaccctgtgctggataactgcgcggcacttcggagctcaaaataatatattggttggcgattgaaattggaacttgatctagtccagacagattttggggaatatcatcaacataaaatgtataaccatttggtgtccacgccacagcaaatttatggaattgaccatcagcaagtttatttgtagacaatctctttgaccattctttatgagcgctgccataaccattccagtgaattgcgtgatcatattgatcctgtgtcgcttcagctaaatgttcaaatacatcaatttcgacacctgatttttttggatttgttaaatcgaggcccattgtcggtgactggacccagaatgcaacttgattaccttccgcacgattaaatctgatagcggcttcccaatagccatatgattgtagaaaacttttttgtgttgaaatcatgccgcaataattctgtagcttgccagaagagctatcggaataggtttttatggttaaatgtccatttcgcacaataaccgctgattgagtattaatacaattttttctgacacccaggccacggtaatcccacttttgggtattaagtattgtgccatcgaaattatcttcaaataacggtgtagggctgaattcattggggatttgtgctagagcatatccactgaacagtgtgcttaatagcaatgtataagttagctgaattttcatctattttccttgtatatttaacatgaatatttatccgagatctattaccgatttctattcgaatccttgaaccttatggatatcaatttaaaaaatgaatgttattaatttctcctttttgtcgtggagagatgcgttactttatcgaatattcacgacagggttacctatttaatttattacccctatacccgttatctttcaagttgcctctttgttggctgcactctctcaccccggtcacatagttatctatgctcccggggattcgctcctttgccgccgcgatccatctcgaaatccatagggtatatgcttttcgttttagttattcaatatggtgttaatattggttgataaaaatgcaagataattaaagtcggcaacatgggttaggaaaaaataattgagatatacccgttatccttcaagttgcctctttgttggctgcactcactcaccccggtcacatcgttatctatgctcccggggattcgctcccttgccgccgcgatgcatcttgaaatccatagggtataggtagaataaaaaacagtgaatatcgatgaataaaaccccgttcactggaacggggtgtatgacaactttaaattatttcgatgcatccagagcttgggcaagatcggcaataatatcgtcgatatgttcaatgccgattgataagcgaatcatatcctgtgatatgccagctttaattaactcttcatcatttaattggctatgtgttgttgacgctggatgacaggcgagtgatttagcatcgccgatgttaaccagtcgcacaattaattttagtgcgtcaataaatcgcgcgccggattgttgcccgcctttaataccaaaagagaggagcgctgagggctttccattcatatactgttgagccagttgatgttctggatggtttggcaatccggcatatttcacccaactaacttgaggatgctcttgcagataatgagcgactttcagtgcattttcagtatgacgctccattcttaatgccagtgtttccaatccttgtagaataaggaaagcattaaaaggcgacagtgcagcgcccatattacgtagcggtaccacacggcaatgcccgataaatgcagccttgccaaattgctcggtataaacgacgttatgataggaggggtccggggtagtcaatatagcaaaccgctgcttatattttttccaggggaaattgccggaatccacaatgatgccgccaatagagttaccatgtcctcccatatatttggttaaagagtgaataacaatatcagcgccatactcgaaggggcggcaaagcacaggcgtggcgacagtgttatcaacaattaagggaacaccatgacgatgggcgacgtcggcaaattttttcagatcaacaatattaccggctggattaccaatagattcacaaaataccgccttggtacgatcatcaatcagtgactccaatgctgcaatatcatcgtgttcagcaaatcgtgtttcaataccgaatcgcggcaatgtgtgagctagcaggttatgagtgccgccatataacttagcaacagatataatgttatctccagcgctagcaatggattgaattgcgcaagtgacggccgccatgccagatgcaacggtcaaagcggctattcctccttcgagtaaagcaacccgtttttccaatacatcattggttgggttcataatgcgggaatagatgttaccctcaacctttaaatcaaacagatcggcaccatgttgagtatcgtcaaacgcataggatgttgtttgatagataggaacggcaacggctttagttgttggatctggggaatatccgccgtggatagcaagagtttctggtttcattttcgatctcttcttttacggtaagatgacatatatctttgatgaataggtgtaagcagcttttgttaaaaccatatacccgttatctttcaaattgcctctttgttggctgcactcactcaccccggtcacatagttcgctatgctcccggggattcgctcccttgccgtcgcgatccatcttgaaatccattgggtatagccttacttactattgctcataaataatttaattgatatctttttttgattgatgaactattagaatcggtatcatgtatagacatgatatttccgctaattctttattaattaaagaaataatttgaaaaagttactaattatttgctttcgctatgctggcatctttattttttaagaatgtggatattatcacaaaagacttcaacgatttcagccaagtaacattaactattaaaataaaaaatgagaacaaaatatgcaaataaatatccaatcttttagaaagatcacaaaaatttccgtgaaatagttagttttcgttagattggtttaatttatttcttcactgttgcctgaacgaaaatagaaggtatactcatcgttctaattttttcgaacttttctaaatgattttggtcgtaatttattgttagtatgatcaatattggcactaaccaataaattagtgggattattatggctaagttttcaaactggcgggagttaaaacaacttttatttttctctttccctatcatcgttagtcagatagcacgcacagccatgagttttgtggatattgtgatgtctggtcactatgctacggctgatttagccgccgtaacattaggaagtagtatttggtttcctatatttgtattaggatatgggacgattatcatgctggcagcagatgtcgctaagcagaaagcgcaacatgatgatgaagggattaaagacagtcttaaaaattacttgtttctggcggtgatactttcgataccaataattattttattaatgttagttagctggctactttcgtttataggcatcgatgagcatattttagaaattacccagggctatgttattgctctggcttgtggtgttcctagcgttatgatatttaatgtttttcgttcatttctacaaggattggaagacacaaaaatcgcaatgtatttgtctgctggtgctttattattgaatataccattaaactacatacttatttatggaaaactgggtttgccagaaatgggaggtattggcgcgggtattacaactgcaattattaataatctaattgctgtatgcctgattatctattttttgctaaagaaggaatatcggcgatataggccagatttcagtttaccaaaatataattctttaattagaactttttatattggtatgccaagtggattggctctttttgttgaaatggtttttctggatgtgattgcgataaccgctgctcctttgggggcgcaagtcattgctgcacataatattatgcttaatattacctctatcatctataccataacagggggaattgcagccgcggtaactgtgagagtcggctcctatattggcaagagagataaaatatcattaacaggtactataaaaatctcaattgctttgattttatctatttccgcagttattggtgttttaatctattatttcgcaggttcatttatttcactctatactaacgacaatggcgtcataataattgcgcttaacataatctttctgttatgcctgttccaattctttgactcttgtcaggcggctttatccggtattttacgaggctttcatgatacccgatcggtattttacgcgccgttattcggttattggttggtgggtttgccattagggtttattttggctttgacagattgggtaaccgagcgtatgggaattatcgggttttggtatgggttggttttgggtctttttgtgaacgctattttgctgtttatcatattaaaggttagacagagaggaatgatttctcggttaatttcatattaatcgaagagctatcgtatctacataaattccctgtcgaaaggtaggggatttttctgaatttatttaaataactgaattcaactctttaatcttggagctaaaagagtatcaatgttaccatttgactatttattttgtaaaaaattacagttgatgaaaatttactcgataaaactgtggttattttattttccatcaatgggagatgatatttagttataatttaagtcatgttagtaatatttttgttttagtgagtttactaattgatatattagtgattattctcagaataaatatatacccgttatccttcaagttgcctctttgttggctgcactcgctcaccccggtcacatcgttatctatgctcccggggattcactcccttgccgtcgcgatgcatcttgaaatccatagggtatatttatatctgtggaaataatttttctatttaaatcatttagatggaatatatattttttgtttttatttctcattgtcaaatatttcttaattaatgtgaaatagctaatttgatatcacatagtaaccatttaaataataaccattaaattagtttattattgaaataatttcttattcatctatctatatgtattgatttttttacgctcattattggtgattcacctaatattatatccatccttatattaaggttatggcaaatatttatttaataattaaatagttatctatattaattgccattctatacaaatagatacaattgttttatgataatgattatcatttcattttttattaaaagtacgttagtatgcgcgccagtcttcggacggtactaaaactatgtaataagcaatactctaacatttaattagttaacataaggaatatgctatgaacaaagttaaagtgttaattgcagtattaggtacatgtgggttagtaacacaagctatagcggccccaggttttgggcaaactcaaaagtttgatgagaataaacctagcgttaacgtaggggtgactgaaccacgtggtggtggtcacccaaccttaggtggagagccggggattggggtgcaatctatttctaatggtaggattattagcttttcaagccttgctgcttatgtcaaggcggatacaaatggaattcataaaatttctatgcctggatcgggtagtcatggaggcatgggggtattcaactttagtaaagtggctgatgctgatgtctattttggtgaatggtcacaaaccggtaaggtgaatgatactactcatactgcctattattccggtaaagatgtcacgactaatttgcctaccggtggtattgcaacttatacggttaaaggaattaaccaatatagtggtagcaatgctctacatggaacatttactgctgatttcggtcagaaaagacttactggttcaatagcaaatagcgcactcactgtcggtattaattctgttattaaatctgatggctcatttgttggtagtgcgactgctggaggtgctgttggtagaaatagcggacatttctttggtgataatgccgctagtttagcagggactgctacgtttgctgcggaccatagtaaagataccgcctttggtggaactaagaacccgtaatatgcgttcttagtaactggataaggcaaagccatgtgggctttgtcttatttttgtttatttttgactcgacgattaagcagtgatattaccgatgctaaatacctcaattgttcgttttactttactcattagttgtttgtttatagagccatctctagtgttggcagatgaagataccggtagaagattgtggtataacgtacagcgaaatttgcaggatcaagaaaaagcgttggtcacagatgaaaccgtggataaaaaaacggatcatttattgatagtccttaatggtcaaacgtttagtgttgaaaacaatgtgaatgatattggtcaggcgctttatttagccattaatcatcaacaagtgcaggatgttgagcgttttttatcgatgtaccagaaattacctggacatgatacccaattggtccattttgctcaggcaaatctggcgcgtttacaaggtgacttagtagcagcagaacagcattatcaggccatcttgcagcaacaacctgattttacccgggctaaattagagttagccagagtctattatgagaatcaaaagaatagagaagccagcttactatttaatgagatttcagcagttagtcgcgataatgaaaataaattaccaccagcagtcattaagaatataactaattatcaggaggcgattaatttgcgtaattcctggcgtggatctttctccgtaggatatatctttaacgataacacgaatatgtcgtcagataagcctcctgtttgcactctctatcgtgaaaatggtgagtgtgcggttgaacgtaagctgcctatggcaaagaaagcgaatggtattagttatgatgctacgttacgtaagatatatccgctaagtggtcaccacggtgtctttttacgttcgatgacttatggggaaagttatcgtcatcatagtgaggagaatgaaaatacgacttctgcttattttggttatagttataaagcgcaaaaaaatgatttcctaatggggccagttgttgagtttaattctgttggtaaccattcccgttatcgtactacgggaataaaatctgaatggatgaatattttatctgaaaatttggtattgaatttggaaggtgaatataagcagtttcgttatcataaactttataatcataatgacggtaatatggcctctgtttatgccaccttatcttattatttaactgatcagacaattacctttgcgggtggtgattgggttaataaaactagtgttgagaaagctgacgattatcaacaaaaaggtgtgagagcaggcatttcaactcaattgtatccgggaattaatgcagtggtatttactgtattacgccagcggcaatttggtgattacagtgtgcctctaaatgcacgtcgtaaagataatgaacaattctatgcggcaattgtgagtatgcctaaatttgaagttttcggtttaaccccagtaattacttatcggtttagaaaaaataatagtaatgttgattggctctattcctataataagaatgaagtgttagtcaagtttgaaaagtatttttgatactgattgaagtaacaagttatacccaatggatttcaagatgcatcgcggcggcaagggagcgaatccccgggagcatagagaacgatgtgaccggggtgagtgcagccaacaaagaggtaacttgaaagataacgggtatataccctatggatttcaagatggatcgcggcggcaagggagtgaatccccgggagcatagcaaactatgtgaccggggtgagcgagtgcagccaacaaagaggcaacttgaaagatgacgggtatatttcaatccccactatggcagataatgattatgtataaattaaataataaatatagcaaaataacattcatgctggcattggcttacagtatgatgccctaccgtgttgatgccgaaacatcaatagcttctgctcagccatctaaacaatccactgaaaataaagctgaccttggtaaaattaacgtttcagcgaccagtgaaaaagatgaggcaggttatgatgcggtttatgataaagatattaccaatatttatttgggtaaggatttggtagaacgctataaaggcgcttcaccagcggatgttttaaaaagtgcagttggcgtatttagtggtgattcgagaaacagtggtgcattagatcctaatattcgaggtattcaggggcagggacgggtgcctgttaccattgatggtactgagcaggcaattaccacctggcgtggttataatggtgcgaataatcgtaattatattgatcctaacttgatcagcagtattgaaatagaaaaaggtccgtcactgacgcgtggggtaaaaggctcaatcggtggggccattatgataaaaactttgggtatcgatgatgtggtaccaatagatgaacgatttggtattaatttgaaattggaaaccagtagtaatgcggttaaagaacgtgtaccgagtttgacatggggacaagattatcgagatattcctggttttactaaggggtttaattatgttgatcctgcgctagaaattacgccgaaaacctcaaaagataataaattattgggtctgaaagataatgcaatacgtttggcaatcggtactcgccaagagctctttgatttaatggcagcttatagttaccgcagtaaaggaaactattttgctggcaagggtggtgctcatcgctatgatgatcccatcagtaaaaaggatatagagatccttgatggtggtacccggtcgtatgatccttatttgccttttgtcgcacgtatatatcgccctggcaatgaggtacctaatacctccagtgaaatggaatcttggttagttaaaaatacttggtacttggctaaccaacagacgattgggcttggtatccgcgacactaaaacgatttacggggagattatgccttcgcggattggttgggttcgtgctaaagataatgttgtatcgcagtggccgttggcgaatgtacatcagcaggcatttaatctggattataagtggaaacctgatggaaataagtgggttgattttgatatgaaattttggattacccgtactatcagcgatactaatactgccgggggatatccacgtgaaccgcgagaacgagatgaagtatgggatgtgaataataagcaaagagatccgaatattgatggtcgtctggtagatactgcttctaccaatgctcataataaccgttggggtgttgatctttctaatgcttttgcgttgaccccggatctggatttaacattgtcagctaatctacaacgggaacgtttaggttctcatgatgattatgaagcaaaaagtttttctagttttcgttcgctaccaagaaaagggcgccgtcaggagaataatattgcttttaattttgactggcgtcctacttcatggttggcattaagtgccggagctaaacgagtcagttattggtctaaagatgattttttaaatgaacgtttagctgctcatgatcttcgctatagtcaggataagaaagtggttggtaagggactgcaatatatgagaacacttactgatcaggaagctgtattgtataaaaaatatagcaattgcgctgatgattgtttcgatgatttagatgaatttctcgaatatgaagaaaagaagatcacagaatcagaagaacgggattcaattcttcgccctatggcaccggtagatgtgctttggaaatatcatgacgatggtaagttatataaacaagataacccttatttcaatggggaacttgatatgaatgagcgcgttattgatcctgtgacgaataaagaagtgtataaatatgaatacagtactgctcaacagaatagccgttatgttgatgattctggagagatattgagtaacagtgatggtggtgtttatagagaaaaaagcgaacaagagcgttggtctaaacaacctaaacgtaaggatcatgcttgggctccggtattttccgcaacagcttatatttctgataatgcacgtatctatacccgttatgccgaagcggtacgtatgccgagtatttttgaagatactgtcggtttctcctctggtctcattgataaacctacacgtgcctctaaacctgaacgtagtaaaaccgttgaggtgggttatgtgcatgatttaagtcagttattaggtgcagagcgtaatgcagacattaaattcgcttattataatacagttatagaaaatatctttgaccgtgacagtaactttgtatttactcagctagataaacagaaattatccggtttagaactacaggggcgttatgataacggtagtttctttacccattttggcctatcttataatcttaagaataaagtttgcgataaaaccgcatcgctgatgttagatccaagaaaccagtttggtgtccctgaatgtattgatggtggtttccccggtggttttttaaggacagctattccaccgcgttattctcttaatctgaatattggcggccggttattaaatgaaaatttagaaatcggcagtagagtattataccacagtagtgttgagaataaggatgaaaaatggttaatgaagaaaataccaggcgcttataaaggaataaataataacccgatgcgttggaattcggtcatgactgtagatgcttatattaattatcaggttacgccagatgtaatcattgaattatccggcactaacttaaccgatcgctattatttggacccgttaacacgttccatgatgccagcgcccggacggacgtttaagcttagtgtcaccagtcggttctgactctttaagggagattagtcggttgcctgttaagagcgctggcaatctccagagataacgaacggaaagatggcttgaagttatgatgaaaaatcgtatttatattggcttatttgcttccttactgttacacgcgggcattctcgtgtttatggcgtggcatttactgcgtgatgacagtgcgaataatcaatcagtgaattcgccaataatcagtatgtcagtagaaatggttgcttcggcagcaccggccggacaggagcaacctgtggacccggaacctattccgttaccgccagagatagcggtagcggaatcacctcatgaggcaaaaatagctctcaataagccagtggataggccacggaaacaagaactgcccaaaaaacaggcagatgctaaaccgaagaacaagtctcagccacagaaagagctggtggaagatcctcagccaaaattggcagagcaaacggaaggcagctctcaattagcagggagagatgctgtggattcacaagctggtgcccgtcaagcgacgaccagccaaccgatgattggcatgggggctgatgagttacaaaactatcagtccgccttgcgtcgtgaaattgaaaaacataaacgctatccgcgtcgggctaagaagatgaagcaacagggtatcgtacaggtcaggtttagcttgctggatagtggcgatttgacaaatcaccaattagtgcagagttcaggcgctgatgaattagaccgcgctgcccttgcggctatccaacaggctcggtcggtaggactgaaaccggccggtttgccaagggatctcactttagcaatagaatttaatttgaaataaaggtttgggcagcgaagagactgtcgctgccctgataataatggtgccatgtgagtttggtacaagttaggtagcttcggtgttcggccgttcaattcgcatatgtaataacggaaatggattaccttgaccgtcaatttctgagcggttaaaaacttcaaatcccaagtgctgatagaaacccaccccttgaacattttgttcattaacatcaagttcattgatacctaatttgctaatagcaaaattcagcaatgtcttgccgatgcctttgccacgggaatctagagagataaacaacatttcaactcgatgctgatcaacgctaataaaaccttcaatttcgtgtttatcatttatcgctttataaaccgtcagcatcggtaaataggtatgcagaatcaatgggcgtaattgattaatatgttcgtcagataaaaagtcatgtgttgcccgtaccgaggcttcccagatttcgatcagtttattgaaatcggcctttatcgcttgctgaattctcatattcatttttcttaatcttttatttctctaaaccgatgatgaattaacgctatcacatttgttgtgatggatcgcttcagatattactcagacttagccgttattcctatccattattcttatcagaatcttatgctgtctgttttgtgatctatttcatgaaacaaaggagagaattcaatctatttggtctaatattactttttatagatagttgaattttaaccaatttggttaattgaacaatcaagcaacactaaactttaaaacctaaaaaaacaatgcgagattctccctgttgctaactataatgaggtattggttaatcagaaagggattgagtcatatctcattaacgtagtttctatttggattgatcatttcagttgagcggctagttcaatgataaatataaaataacttcttgaggatcatattaatgaaaagggcatttatatttgcaccaggcatgttagcactttcgataagtgcaatttcgaacgcacacacttatgaccatctatatgtttttggtgatagcttgagtgatggaggaaataaaggtcgatatatgatcaatggtacaaccagtcagttgtataacgattttattgctcaatatttagggactaaactgacccattcccaaaatggggggactaattatgcagtgggtggagcgactgctgttcctgatttaaacaaagataacaatactcaaaatcaagtagataattatctggcaagccacggtggtcgtgctgatcctaatggcatgtatgttcactggattggtggtaatgatcttaaagctgtcatgttaggaggcgatccgaaaattgttagaaatagtgcgatgaacgcctcggcacaggtgcataaacttcttgatgcgggagctgggatcgtcattgtacctactgttcccgatctcggaaaaacacccatgattatgaaagccgtcgtctctcagggactcactaagctcccgatttctctcactcctgaccaggttgaggaattaaaggatatgatccgtgcgggcactaatgaatatccaaccataaatgaagatattcgctctcaagttatccaagggatctttgaaaagcttgcgactagggcttcaaagggagatgctaaaacagcggaagaatataagcgacaattacttgataagtataacgaaacaagcagaaaagcctcaggattggttgataagtacaatgaattagaagataccgcacttagcaagaagggcggcaatattgttagggttgatgttaatgcacttttacatgaagtcattgataatcctttacgttacggtttttccaataccttaggctatgcttgtgttcgggataaggaggctaattcttgtcgttctgatgataccggttttgatgccagtaaatcctttttgttctctgatgattttcatccgactccagccgcacagcgtatgattggtgagcagactatttcaatccttaatgctccacatcaggttatgtcactgacgaataccaataatgtgccggtgaagggggcgcttgcctctcttgacggccgtttgcaacagctacgcagcgtgggtaatgagcagagtaaaataggcgtattcggtggttatagtggaaatcacaacagtacattgacactgggtagtgactatcaactcacggataatattttgttaggcgggatgatctcgcgttatcaggataaacgctcagttaatcatttccgcgctgatggccgtggttatctattcaccacttatggcttatggcgttactacgataaaggttggattagcggcgatcttcactatttggacatgaaatatgaggatattacgcgcggtatcgtgctcaatgagtggctgcgcaaggagcatgcttcgactaccggtcatcagtggggaggacgcattaccgcgggttgggatattccgctgacatctacggtgatgaccagcccgattatccagtacgcttgggataagagttatgttaaaggttatcgtgaatcaggtaatagcagtacggctatgcatttcggtgatcaacgttacgactcacaggttggaacattaggctggcgttttgacaccaattttagtcgttttaacccctatgctgaagttcggtttaaccatcagttcggcgataagcgttatcagattagtagtgccattaactcaactgagacatctttcgtgagtaaaagccaaaagcaggacaccaactggcgtgaatacgttatcggtatgaatgctgctattacaaaagattggggcgcttttgcgtcaatatcacgcaatgatggtgatgttcagaatcacacttatgcgttcagcttaggtgttaatgccagtttctaatttctggttaaaagatacaagttgataaaacagtagcgccctgtttgtcgcacttgtcgcaatagtgtggttattgtcgtagtaatgcccgacaaagtgatcgggcatttttcgtgatgattgcctcatatcttgggttgtttataaatatccggccgaacaatttgccaaacaaagttttcttcgttcactggggaataacccattttttcatacagccacggtgccatcgaagtgacaagcataatatgacgaagttgtgctatttggggatgttccaggcaacatgtcattagccagcgccctaatcccaatcctcgatagccatctaaaataaaaacatcactaagataaccaaaggttgtgaagtcagtcacgatacgagcaaatcctatttgctgagtatttttatatagaccaaagttcaagctattttcgatcgacagcttaactgtctccttgtcgattccttctgcccaaatggatttcgttaaaaactgctgtatgatcataatatctaatttattcttatctgtagtgacaacatatccatccttttcccaacgatgcaatttttccatgccaggcttcctcttaagataaaatgataataatgggttatgatatctctgtgcttgaatgttttgccgagacttttgtcatggaaagaatatagcgatttgaatgaataacgccatagggccgtatgttgcttcttcaagttttcgactatatagacaggcccttttgtacagaacagacatccatttattcagaattgtttgacattagatagacttaattttgtcttccgatatataccatcggagagaattcttaatgggagacggagttaccataactaatcctttgttagccagtttcaataacagataacgtgctttgtagatggtgaaatcgcattgttccgctacatcacgcgtactaggccatgattctggtgggggagccgcttgcattttccgaatagtacataattcggatatgacattgagtatttgatccgtctgggaaggttgagtcgaatctttccgattttccatattaactccaggctttattgaacccagttggatatcttgaacaattatacctgtcatctttcaagttgcttctttgttggctgcactcactcaccccggtcacatcgttatctatgctcccggggattcgctcccttgccgtcgcgatgcatcttgaaatccattgggtataggataatccaacggttaatttcaacacatgagggcaatctgaatgctctagtcataaagaattgccgggtatatcctgttttgtcaaggttggtttttatactatgcagaacgattatatcgaaaaattgaaattttagatcttttaatttgaaaaacaaattgcataaagtattttattcttatatagatataatttgcgacactatagatcgcaaatgatcggattgaaatgttatctaagtattttgttgtgaaattatttgaatttgtattttttgtttttattaattgaattattctgtaatacttgaaaggtcgataaggtcattgttcatatataaatattttttatgatttattactggcattaaattttttctcatcttcataagattaaaataggattgataatgaaattatttatttaaaatatattgttgttctatgctggtattgattgttattagataatcgtaataattcgaaatgaaactgaataaaattataatagcggccatgttgatattgggtgttgtttctattgcatctatagcaaataaagctgatcgaagttatattacagtgacctttaatggtgctattattgctataccttattctaccgggcagggtctttttggtaaaagtgtaaattctggggaaatttccaacgtaatattgaaaagagcaagagcttcaattcataagagtcttgagaatcaattggtaaattgcagatcacaaccagtagttcatcagttattatcccgggcaacattgaaagtattactggctttaccgtgggtagctaataagacggataaatctccgaagttgtgccagcgaaagaagcttcatatattcagattaatgataaattttactttttaatagcgatttattgattatgaaaaagtaaggtctgattattttcaataaaactttggtgtttaagttatccccattatatgattttttattcataatatctctcaatattaaattattttcacatcagtcttatcctcttttttatattaatataaaaaagaggataagtggaatagataaaaaagatttgaattttaattcattttttccaatgatatagtttaaataagtaaattagaatgatttattcagtctataattaatcttataagtttgtaattgaatcatttattcataaaagtaattgatttattggatattagttgtatattgcctgagtaataatattgatatttttaataaattaattctattgtataaataagcaatatgtctgttagataaatatcagtaaatattaattgagaaatattcttgtaatagatcatctgtaaaaaaaattaaacattaataacgtgattttattgttgatttatgttaacaattataaagataagatatcgactttaatgttaatttttccttgctaattgctagtgagtgtagccaacaaaaacaaagaggtaacttgaaagatgacgggtataggcttttaaccgtttaataacgttgtaaatacctgctttcctttagcattgattgttatctgttctgttaaaatagtgattttggttttgtattttctaacgaaaaaagcatgaaaaataacaaaaacgtgaacaaacatggcaaaacatcgtttttcggacaacatttttttgagctgtatatggatcatgtggagcattgctctgggattctatctggctggtaatttttttggctgtgcagtgacagcgattctctcttttttggctctaatatttttctttattcacatgaggtcgagattaaaaactatgtttggaaaaaaagcagaggcagcggctgtcgagccggtatctcaatttgttgatgataaaaagaacgccggtgcagaagctcgtcgttgcacgattgttgccaagagctcggtatttaagggcgatattgatgtagaaggtgatatacaaatctggggcaaagtgattggcaatatccgggtgaaagagggggcgatccgcattatgcatgctggacgggtcgaaggtgaacttagcgcgccagaaatcattattgatggtgacgttgtggggacgtgctgtgcagcaacgttggatattcttgaacatggcgagctgcgtggaatcagtcgttgcagcagtatgtctatcaagcgcggaggcctgttttttgggcaatcggaacaggttgaaaacaaaacagcatccgaacgtgttgtaccaataaaagataccaataatgataaatctaaagataaggccgcggtaaaaacaagtgcctgataaaccaggcccgtgtgacatctgattcagagacttttggcacgggccacttcctttttagtttaaattacgttgttccatttcctctttagtttgctcattctggcaatttataccctataattgttttaattactctgattgaagtatgtggtttgtcgcatagtaggtatcctgtttgctaactaatattgagggagaatagggttatggtgttggaaacagacaggttaattatgcgttcatggagagaagaggacagattaccattttatcatttgaatagtaactcagaagttatggaatattttcctgccactttgacgatggaacagagtaatactatggtggataggattatccaaagatttgagcagcagggtggttggggattatgggctgtagagctgaaagagaccggggattttattggttttgtcggtttgaatattcctgtggcggaattaccgttttcaccttgtatcgaaattggatggcgtcttgataagccattttggggtaaaggttacgctagtgaagccgcacgtaaagcattggattttgctttcacccaattaaaacttgaggaaatagttgcatttacgacaatttccaatttgcgatctcaaaaagttatgaagcggcttggcatggtgaaagatgaaaatactttcttgcatccttcattaccgaatgggcatccgcttcatgaacatgtgctttaccggattcgtcaataatagcgctattctcttttctggttttcgttactttgatgctttatactattgttgcatagattgtatcttggaaatttaaatgaaatatgaattagctgttatggcggccttgactaaactagatcatcctaatacccgttcaattgtagaagcgacagggatatctgaacgtaaggtgcaacaggttttgcaaatattgcaacaagacttagaggtaaagattaaccgtattagaaatgggaagatcagttattttgaagttatttcttggggaatatttgaaagtggtcaggcgattaactgtaaattgatcgatttggatctggctaaatttaaatattcccgtcagcaagaaaaagatattagaaaccaaaagaacagaaaaacaataatgacaacttatagtgaaaaaaaacattattttgaccgtgtaaaattaaaaaactatagagatagtatgcgtcttgaagggatgaatattgttatgaatagtttgcctgaaacatcgaaagagcaaaaaaatcttaaagataaactaattagaaaatatagtttacaatgaggtagttatggtagataaatatggaacagggcaagatccctatacatatccgggcatcgatacacttattaataaattagctattcgtgatcccgttattcttgagcaggcagaaagggaacttactgaacttgctatattgaatatttcattccagaaaccaccttacgatttagtcttttggcgtaaactccataaacagatattttctgatttatatgattgggctggtcagctaaggataattgatatatctaaaggggatacccgtttctgtcatgctaaatgtattgagatagaaggaaataggatatttgatatactagagaatgaaaattatcttgtaggattaaactatcaggaacttattaaaaaacttgctgaatattatgcggaattaaatgtaattcatccttttagagaaggaaatgggcgaacacagcgactattatttgaatatattgttataaactgtggatataaaatctcttttgagtctataaatgctaagcagtggattgaagctaatatttctgcttatcaatgtcactatcagccattaataaggatttttgaaaattgtgtctcttaaattatataattttgagatgatataatgaattatttactggtattttttatctaagatttctggtgatttcaacttatgagcttgccgattaagcattctacttaattttgattgaatttatttaaagtgattgacggtttaaaaaatataaaataaataaaaccgcacaatgaaagcgacaagaacaaaaatatccttgtcactttgttattaaatatattattatcaattgatttaaaggcaaattgtccaaaagaaaaggctaataatcattactggcgtacatgtcttagcgcatttactcagagatttctgattgtaataacataaatttgccgacgcgaagttaggcgagaaagcagtaatgctcaatactaaaaaacaaattgatagctttttcatggttggtacctcatcaggggattatgtagagtaaaataatttatcctagctactaattattgttcaataataggtaataagttctcttttcgtataattttttgttgtattgttgaaaatctgttgaagtagcgctggtggatttgtgacaaaagatgggtaataattgcttttaattaataataatgaatcattcaatattgattttttgatgttttatctttaagtatattgtttttattattatttttttgaatggtgatacattaatttgatattaatattgtgaaaattataataaaattttttatttatacggttgcattcctatttatacgacaggtgcagcgggacatcacataagagaaatagtaggaagtgggaaggtaggtttctgatattattaataaataaccttttatatttttcatcttaaaaattatttattaatattaattactcagtgatgattaatcactattagtgataaaaataattcatcatacttcatttaataactactatagttaaagtgtattatcaatgcatgatttatgtaattaaatgatttagtcggtagatctctgttgaagaaaatattaattattaaccttaaggagagtccatgattaatatcactgaaaatactgccttaaaagccgtaaacggttggtggaaatgtggcgataccggaataatttatcaatggggatataatccgaaaggaggtcctggacaaattacaataacgtatccaatcccgtttcctacagcgtgcttatctttgcaagttagcgtttattccaatgcgattcctgcggataactattcaacagtttatgaatttaattctaccagcgctgtaatcgggcgtgataacttaggttcgtattggtttgcaataggatattaagtaatatgttattacggaaagaattaatatattctagctttggaattgaagagaaattatattgaaagctacttggtaaattgctcccataatattggatatcaatcaatacatagggagcagtttttatagagtgttcgccggaaattaaattaactactgtccgttattatccggtttagcttattttagcggctgttgattaatataattcagcatggttttttaagagagtggttttttgcatatttcatcagtatataaacgatgagtatccctcggaaatataagtatgtctgtgattatcgagaaaggaagatctatcaggcttgaaaataggtagccttccttaatgccttgcatatcaaattgaattgaggggtaggctttgcattcataaccgtgagttacatgagagccaaaagttccacacgacaagatttttattttacagtattaatctccttacgatcccgttaatcctttttgaggtcgttaacggaataaggtggttgataattgattctattattatttccactgaaatgtcctttatacacataaaaaatgtaaaaacgtcaggtatcgctatgatattaccaggttcataatttttgctgtgaaataaagccctagtccataagaagtgtgagtcaataggttcattgctcgtgatttcatggggagcggagtttttgacgcagccagaccgaatccgaatgctggctgcataatcagaaatgggacaaataaacttatcaagccagcagacaatcctattggctatagtctggtggaaaaatcgttgttttcgcatccataaaaaccatctgccaactagagcataatcaagagatggaataccgagcagacgcctttgtattaatgtccagatgtccatacatattatcgcgccgataccagttatcaagatccgaaaaataacgtctgtgtacatgttctatgctccgtctgatcagagatgttaagctggtaagcattgtgcaacttaaagttaggtttaagtcaattatgaaagatcttgatattggtttggtctctcaacttgctggaatatctccttcagcattgcgattctatgagaaaaaggggctgatacgtccgatcggacgtgttggcctcagaagacaatacagtcctgatgttctgaataaactacaactgattgcgcttggtcgatctgcgggattcacgcttgacgatattgcagccatgtttgatgcaaacggggaaggaaaagtgaacatagacagggaacggttactgattaaggcgaggataaaaccattcgcaagctcagcttagtcgtaatgggttgaaacatatcgcaaactgtactgcacctgagtatatgcagtgccctgaatttcagaaagtcttagctaaagcccaatttctgtcgcgttttgaagtgtaacttctctaaaaaccatccagaggtaactaatgaagcatcttccagtggggatttagcttattcttcgaaaaaatcttttttcgatttactgttcgtttggtggtttttatctttatctttataaagatacacggtaagtaaatgatgaagggtgaactggctgcgcaggagtccgagtaagaatcctctgaggggatctccccaatcccttacagtgtattagtcgcaatctgatctgacacttcgatttgaaaagaagagagttacccgctttgattaaagctgttgccctatcactgtccctactaatttggtggagctggcggcgggaaagcccgtggtgttggatgagtttgtttttgcttatgtgccggatttagatcccactcttgccatcaatcgcgatgagacattacccgcagaaagtcatattgtgcatcgtcaggctgtgaacaaaacagggttagcgagtgaaaacgcagtagcctatagtgtcacattgggaacggaagtcggtcattttgattttaactggattggcctgataaataaggcttctggcattattggcatgattacccatgccccagctcagaaaaaaattaagaccgcgaacggattacagggaaatgtactcacccgctctttcttgctggagtttgaaggggcagccaaagagaccgctattatgaccacggcggaaacctggcagattgattttaccgcccgtttatctggcatcgatgaaatgcagcgtctgatgaataccgacagttacggtgaggcggcgtttttcggtgatgggttttccgtggtttgtcgtggtgaccggtacacggtcaaaaaggggctggcttatattggcgggttgcggggtgagttggcgtttgaccaaacacttaaccgcctgcgcgatacccgcgtttatgcggattttagctatcaaggcaatgtggtcagccagtggaaaaccgtcgttcatatcatcgccgccaatgatcttaaaaactacatcgatgcggcagggtatccgcattatgtctttgcggttgcgggtattgatggtcacggtgatgtgatggatttgcgcattaaggggtcattaaatgaccgtgatatttccgccattcatcaagagattgatagcgtgaaacgggaatatgtgactcagcaggcattggaaagcggcctgcatgggaaacagccgaaagggggctatgccactaatgcagcattaaccgttgttagtgaaaacgccgatagtcgcctggctaaaaaccagaacggcgcagatattcccaataaaaatgaatttgtcaaaaacatcggcttagtggaaaccgtcgaacgggtaatgaatgctgtaccgaatgacaggagaattaacgggaaatcgctatcggctgatatcagtttgatggcgggtgatgttggtgcctatcaccagactacctatatgactgagctacccggcaggcattattcagggccattttcttgtggtcgggaaaatggatgggccaaaggggtgagtatcggtgtagggggtgacacggggcaaatttggattgatgccgatgcacagttgcacaccagatttctcaatgctaacggtgccgtagagcaaaagattacgataggtatcccgattggcgccactatcgaatggcatacggctgcgccgatacccgccggatatgaacccaatgaggggcgctcattccgggcggcagattaccctgaactcgccaaaatttttcccgacctgaaattacccgatgacagggggctgtttaagcgtggtctggatagagggcgggggctggactcgggtcgttcgctagggagtgttcagggggacgcgatcagaaatatcacgagatcattaggtaatcccactattgagagcgggagcaacgcatctggtgcattcagctaccagtataaggcaggcggtcgcgcagccggtgccggtggtggggtgatttcatggacatttgacgcgtccagagtggttccgaccgcaaatgaaaaccggcctgtcaacaaatcagtgatttatattacgagggtaaagtaatgactaaatacagtgcagatattcaaatggcccggtttgatgaggatgggttagctattgttagcggatgggttgcggtttatcgttgtcatcctgaaacacgggaatatattggggccgatatggatagcgtgtcccgcggtttttctgttgcggctaatgcgtatctggatgcgcccgaattacctgacacgcatgatgttgcgatttgtcgtcgtgtagatgaaaaatcctggcgacatgtgcctgactatcggggtaaaacggcgtatgcaaccgatacaggccagccgatcaatattaccgccatcggcgcattgcctgataatctcaccctgcaatcaccccaaaccccctttgataagagggagaataagcaatgggtcacagataaatcagccctaaaatctcatcaaactgaacaggctgaacagcaaaaaatcgcgcgacagcagcaggcagatgcggcaattaaacccttacaggatgccattgatctggatatcgccacggatgccgaaaaatcagcgctcgtggaatggaaaaaatatcgtgtgcgggtgaacagagtggacctttctacggccccgatatcaactggcctgagcaacccgcgtgatgaattggcaacggaaaataatgcgcatctctccgaatatgacggggatgcattgcgcgatgttgtccgtccatccgttcgtatacggtatcgggcagaaagcggacagcggtcactacctgagtccggcaaacgccatcaattatctggcaaataaaatccggggaacgggaaacatgagcgctgtggtactcatgatctgcgcgaagacgcataatgaatttatccagcatttaaccccattttcggcggtgttgccgttgtcggtattttctcaggtcactcgtatggcaaagacagcggaacgtctggcgatcaccaaaatgcaattgcctgggaaaccggacagcggtttgcctccatttcaaccgttttcaacatcaaccagccgcatggccgtgaatgcgcgattgattgcacaggctaaaacacaggttagcgccggcagcagcattgcgggattgaaatcacaattaacaaacttcacgacggtaagacagaacaccttacaacaagtgactgccgctctgaatggcgtcaggaacaaatcggcccgtgtctgggctttttcagggaaagggaatggcgcattactggccgaaaaactgcgtcaggatatccctgaacaggatgccgtttacacgctggcgacattatttgccggggacgatattcgcgcattagaaaggatgctacacaatgagccaaattatcacactggcccttgatggcgaggccatcccattaaaaagtctgaccgtaaccccatcggtggtatttcaggacacagaccaaagcggccagtcatccagtaccgccgtagcggagcaaggtattaagcccaaggagttacgtgttacggggatcattccgtttactgagcaaaaaacgctgtcacgcctgtttgcactggcggaggccaaagataagggaagtctgaaacgttatcgtgtcgctaacctgaccgcaggtgctatcaactttcgcatcgggacattcacccataccattgatgccagtaagatcgacggtaaacaggcatggcaggtcacatttactttacgtgaacatttatctgttgctgagaaacgtgatgcccgtgctgccgataatattcaggccagaaagcaaacaggtcagggggccgccgccgcaaaagaagcgccggaaaaattaagctggtttgaaagcaaagtattgaaaccgattaatgacacaataggaccggctaaataatgacaccgattaaccggctctatctttccggtgatgaaattcacctggttgacgccaatattatgctggagctggcatcctgtggtcgtggctttatcacggcggagacgacaacggactacaccggaaaactggtacggctggacgtgggttacacggatttggtattacgctggtttacgggttatgtggcacgctcacagccagcccaaaacggttatcagcgtctttttgtgcgtgaactggttggtgtgtttgaccgattatggtcgtgttcatttcagcatccaacactgagccagattgtggactggttgcaggagcacagcggactgaccttcatattgccggatgccccttatacggagacacccatcccgcattttactcatcatgggaccggctatcagttgctggctaatcttgggcaggttttttcgattgaggattatctctggcatcagttgccggagggttcggtttatgtgggcagcggggcgcattcgatgtttgcggggaaaccggtagagatccccaatgcatttagccagtgccagtccgcaggcaatgcgatgaccattcccatgatcccatcgttgcgtccaggtgtagtgatcaatcagtaccggttgaacaaggtcaatctgaacaatgaaaacatggtcattacatgggaagccgtcaacaaactgaccggtcagtcgcagaccaaaacgccaatgcagcgtcagattgatgccgcctaccccgaattatcggcagggctgcatttacccaaatttgcccgcattgaggcacaccctgaaaatacggtcagcggcgatatctccgactcattccggccacgctatgcggttgatgtgcaattattggctgatgatggtcaggatgccgcggttcctgtttatcatgctgtcccgctgcctttgccgatggcgggcagtgaatccggtatgtttcaatatccgccagtcggaacggtggttgaaatcgcctttgaggcaggcagaccggataagccctttatccggcagacattaagccagggcaataccttgcccgatatcaagccaggcgaacaattgcagcaacagcgggcggaagtttctcagagggtaactcaggaaggaaactggattcgtcagactgaccagaccattaatgaatcgtctatgcaccgtgaagtcagggcagacacggaaacacgtaacgtagtcgcacgggaaaccacgatacaggccacggataaaaccacggttttgggcacgtctacgctattggcgggcgctgtccggcaaattgcagacggtgactatagtatggcgacctcatcaaatttcgttgccagcgtagggaaagaggccagtatcgaaatcggacaaaagctgatagagaagattggtctgcttaagcagagcatcgccggtgccaggcaagaaatcatcgcgcccgtggtttgggtgggcagccagcaaatcaatgtcatgaccttgatttagagacgttggatgtggttaaagcactggcggaacagactgccgcccatacgcaccacaacacaggtgcgccggagaacgccagcgtgataaggaacacgggctataaatccgatggattgaaacagaagtattcgcctgtgattggctagattgattggcctctcttcggtaaggtttatttttaccttttctacgtggtaaacaaaagtgttgacatggtaagcataaatgtttactgtgtttgtgtgttcaacagaatggaggagtggtgaagcaaagcgagtttagacggtggctggaagctcaaggcgtcgaagtttcaaatgggacaaaccatctgaaactgagataccaggggaaacgaagcattatgccgagacaccctagccaagagatcaaagagccgctgaggaaagcaatcattaagcaattaggattgtgataaaaacccgcctcgcaaggggcgggttctcgcacaggttcatcattaaaaatatgcgatatccagtcacactagagccagtagaagagggcggttatttcgtctcattcccggatatccccgaagctttaacccagggggatacacgggaagaggcgctagagatggcactcgatgcgctaataaccgcttttgaattttacttcgaagataatgaaaaaatcccgcttcctggccccgtagggcaggattatgttgatgtgcccttaagcgtggcctctaaggtgcttatgctcaatgcgtttcttgattccaagttaacgcaaattgaattagccaaccgtatgggggtgaaaaagcaggaagtgacccgtatctttgatttacggcactcaactaaaattgatacggtgggtaaggtcgcatcggctatcggacatcagttaactttgtccattgaatgaaaatcaccattaattaacaggctgcgttaatacgtggccttttttatatcctgataaactgcgaccagatgcatacagcactgttatcaatcaaaccaatacgtaccaggtcaataatgtggtatcaatcagcgctacgggtttgtgttttgattgtctgaaacacattattgattaattctctcgcccgcaaaatatgcgggctgttttacatcttcatagggctatgaatacaattttgatattaaagaatgggcagtgagtgtaataaaaaactgataattcagcgtgttatattagcttagtggtttaaaggttgttgttactttttcggatatagaaataacttatgtgatatcagaattgtttggtaaatcatttcggacagttcgtttgataggctgcttattttcgtcaaaataccgactgggccatatttcagcaggggtgacaccaatttcctgagcaatcagtaattcccctttaggccaggggcgcgttaaagcatttgctaatgttgaagagcttaaaccgtgctctctggataatgatgccagcattttattcttcttacgtatcgcagcgataatatcggcggtatgccagtcttttttcatattcctgcttccctctttggtggtggcgattcaaacagggtttgcagaccggcgttcatttccggcgaggtgttaacctcccctgcctgaaccgccatagaggggcgatagcaggcacattggtaaaaacttcttaccagcgtccatgaacgcaaggctgcaaaaccttggtcactggattttgccaatgacaacactactttaaccgattgtattatttgactcaagaatcaaataaataccttagtgatggtttgtctcgttgcacttatgacgaaataaatgaacttatgatgaaaacggcactacaccgcacccgcctgcacgttttggatcaaaaaattttttcaattttaaaatcctacaaggcaaactgccaaaccgcgccaatactggcggagtgggagaaatcacaaactgaaatgattgaaaagattttcaggaaatttcagtttttggatcaaaagaggatcacggaaaaatcccaatgcattgatattaaatgaaaattgtattttacgtgaaaaataagctcacaaagaaaagccgtgctttatcatagaaatcagatagagcgcggctttacaggatatacagaactgaaattgttttctccttttgcattatgacaaggaagaaagtgaaagtattagttagcgtacttttaattcattaataagcgtaaggctacgttcaagcatcttaagtagtttcagtgatgaaccagacggaatgcggcggtgcaggtagtgtccattgatgcccataaaaataaaatgagtggacgcaaagtggacattgggcaaacaaaaagggctacaccttagtgtaaccccttgatttatttggtggagctggcgggagttgaacccgcgttaattgttttgcatcttattgttataaataatatttttatgaaatatcttcgctgcgtatcctttgcagctcctttcatgtcccaccactgacctgcttgggtttgtatgtgctgccgtcatagtctttcagatatgatccataatgtctgaaaagcatctctgggcctttatgtcccatttgagcggcaagccagaaaagattaactccctggctaatgtgttttgttgcaaatgtgtgccttgtctgatatgggttgcgataccgaattccagcctttctcagtgtaggtacccaggcttttttacgaattgcatctgcacctgcccaagcctcgcctgttttaggatcttcaaatatcacgttgcctttcatgaaagtgaatgccttctgatttaatagggccgacatagcgtcagtgttcagttcgacttttctggtaccggcttttgtcttcgttccttttattattcccacaacttttgccgactggacatgtgcggttttgccaataaagtcgatatcttgccaccgaagcgcgcataactcggagcttctaagtcctgtatgtatcgcaaaaaggaataaattttcccattgtttttgtttattgcctgctgctgacagtaatgcagtaacctcgttaggagatagggggtcaacaatatattcgctatcattttctattcgttcagtttgataccgtgatgctgtgactaaattcacaggattcatactaatcaggcaatcagtaactgcttcatctatggcgcttcgtaaaaatgatagattgttcctgatcgttttcagagcagttgatcgtttttgaatccaagtttttaatattgctggtgttaactctacaacgggaattttatgtaattcagatagagcagttttacattttttatatccattaattgtggatggtgataaatttctggtttcacagatttttaaatattcatctaaataatcttttattgttctacctttattgacatttccgaatatttttagacgtgatgaattagggaaaaattcagcataaataaaaatatcccgttcaattttattgtatatttcgccgagtttacgctcggcatatttaatatttttgggcgtcacttccagatttgagaggggttctcggcatttaaccccttatatgtaaaagagatatttatagtttcaccagaacgatgtttccttactgtaattcctctgggcaatttactacgctgtttttcctggcccacttagctacctcatttaaatcaatccagcgttccttaacaccttcaactttcagtacatgtacgccatcaagccaaacaccgcgctgaatgcgtttattaattgagtcaactgtttcccctgttgcatagcaataagcggatatgggaacacattcaatatttaccatttatttacctcacatggttttgcctcatcattgatataatgatcagatcaacggcagcacaaacacgggtaatatcaccttgattgcaagatgtatttttgacactggctgctaatcttcccaatttgatatcgaagttggttaataactgttgtcctggttgccagggttgcatgatggttctccggtcaatggatttaccatcatgctattcattgtgttacctgatttctgattaagcttaatcagttttgagtgtgaattatggcctcaatgggtaaacactcaaaaattccagggccttgcatccccatatcggctatgcaatttttttcatcctggtaaatatggccgtaaggaatgtattggcagtttatcgaagaacatacaagtagaaacagaccgtatatcattttcggtccctcattttctcgatagcttgagaattggatactggaactattttaacgtcaaacgggaaatcgtagagtacattacaacttctattgataataatgattccattgcgaccatcaggtagcgttaatttaacaatttcatttttactgtgtgaatgtcttaacattggtcggtctcttttaatttaccttcaatttcgtattctgctgcatgtttttcatctaatagacacatgccgagaaatacaaacgtaaattccacatgcttgccggatttattttttgatattattcccttgtgttaatttaaggtaatgttaaatatctaatggaggtaatgttgattatttccagttaattcattttccattgaggccagtaatttattttttaattgagcaatgattttcttttcttcatctgtaatatcttgactttctcctgttatccattctacttggtatttatttaggttttcatcaaatgagataatgatttctaatcgtgcagccataaatcactccatattatttattgccccagtatttgtgggatgtaatgaatattaacgtacttgcaggcttctctggccgatttcaatatgagctcccggtacattgataccgttttcaatagcttctttgatggcttttttgtccggggcggtaattgtctgcacatcaactaactcatcaggtaattttgactcatcatcaatgatgacattcataataccttttctggctgtgaacgtgtttctggtagttcgtagtgaatccatgccggctttcagtaaacagtccagcgcatacttttttaggttttttacttgcctttcgaatgattttttacggtcagtgagtcgcttagactcatccgcaagaatcttggcttggccttctatattgcgaacatggatcatgatagcgtcaagtttatcaccgatagtacattcgatactttcaagtgtatcggcgatatcttctggcgagaactcgccggtttctaccaactgttgtaatttttcataatctgctgctaatgcaattgcggttgtggtcattggtttgcctcttctaattgggttaaacattctttctctatttcattcaagcgacgcagacgaccagataagtacttttcataatccttgtctcctttggccttggaattgcctaaatgaatgcttaattcacggataagggtagatgctatgccgcgaatttcatttttgctgacagcggtgcgcatagtttctgtattacgggtgaacttatcgtctagttccttgcgtaatctgactagatcctcggccttatcactggcggccttgatttcaaattcaatattattgtcagccagatattcagggttgtcatgcatacccataaatacatcagcagaaaatccaagcatcgataacgctttctttatagcatcggtgagtgatttcttgatggcctctccatctgttttaattccatatttggttctgtacatgtatggtgtcgcaccataactttcaatttcagcacaaatgtcacattcaaccagataccaaaagagaattttgatagagtgattttgttcacatattaatgtgccgtcagaatcacgtaagaatcggctcccaatttgtttatttttgtcgtcatagataggttctgacatgggtgcaccattgatcagtttttcttctgtgacattacagccccatccataaccgaatggtccgaatagttctgttgcccgcataaacatatagttactgtttatgcttgtaccattgaaccccattccctccaatggttttgtaaagtggggatcggtacgttggacagccttccagatacggagattagtttgctgttcattgccttgtgccttgatagtttcttccagcaaattggcccgatgttggaagttatcatcattggtgctcagggtggcgacaggaggcaatgaggtgacttcatcatccgccgtagtgttgtcttgtgcagtctcttctactgctttgtcctctttggtttgcttggtttttctggtcttgagagacttggcttcgctttttttctccttaacctgtagcgctgcctgttgggtttcaacttcatctggagtgacatctgttattgaggcttctgatgttgacaccgaataattggaaaccttgggtttctcttctggtaattcaacgggtatgtcggtatcacttaaagtacagtttaagaattccttaatagcgacggcatcggtcagaaattcagggtggtgtttaccttcacgtacgactctgaaaagcgtttcccgtggaatggacagagcgtcggttctgatacgaaatgcggtagaccactgccgccatgcttcattgttatttgttatcagttgcttagcttctttcatactgtgtgacataatcgcccagcaatgaaagtcaccgtctagtaatgccagtgcaatttccagatctaacgtggcgtaagtgtgattaaaatcacgtgtagtaatagatgggtttttctttggttcgagcgttctagcctgccatgtggtgccgttgaactcgtattcagtagcaaatttttcatcaaatttaccaattggtgggcgagggaagccttgtatatctttacaaataatcggttttgatgtgttgaagttgctcatatcgtccgcgtactcttccccaaggtaaacaatggccatagctttagccattttttcggaattggcttcgagtgcaattgcaagtggtacggctccatttttttgagctttttttgtcggctcaaagacacagatatatgtgaacattggtcttgcctctttaataaattgctttttttgccaatcttattgctgccttaatcccggcttttggcattttgacttttggatataattccttgacagcatttgaataaaccattcctgtcgttgggtaatattcaactcgccttttgccaccgataatagatatacccaagaaacttcaagatgcagtttttagcacctgaaaatggtcgttaattctagacatcagcgagtccgctatatccggtagcgttgtggtgaaaaatttgaagacgttgtctcgaaattcatgtttatccgcaaaataacggttatttcgaacctgttcattcatgaccttccataatcgctctattgggtttaaatttgggctatagggaggaaggtaatgtaactcaatattgctaacataagcccactccttaacaagatgagctttgttgtaacccgccccatccacaataagatgaattttttgatgatagtcaggataagactttcttatttcattgaaaaaacagcaaatgttgtagtcattgatggtttgatattcctggaacaccgtacgaccaatggcattcaggttgagcgcgcccaatatattcaggcgagtccggcttcctgttgttttgactgtttttttctcgccttttcgcatccagccataaccgagtttggtgccttgagtcgggtgaacagcatcaagaaaaaggatgggttcgtctttcgctgtgactttaagattctcataatattcaataaattgtcgctgtttttctgcgtcgaatttatgagggacgccacaaggttttttataagaaaaaccctgacggtgtagccatttattcatgccgggaatgctaaaggtaatattccagagctgagcaacataggccacgatttcatgggtgtgatggaaaagatgttgagataagtgattgattaaaaaatcagtttgttcttgagaaagcaaactatcagaccccccattatcagatttaagtttaccttgattaaggtaatcgctgatatgacggttaacggtcatttcatgaagacgcagggcctgagcgatcatcactgaactccagccttcagaggccagcaggaccgctttgatgcgatcacactccctcttatcacggcaggtgtgatggagatgttcaagttcggctttttgttcatcggtaatgaatattttcatagcgaggataatgatctccatttcggataaaatcaagcatcttcaatgattacgggtatatatgtatagttgcgtttgttgtatctctattattttcatgctcaatagcaattaaaccattatctaggattaaattaattacatcatttatgtttttcataaatacacctgagccttaatcaggtattttttcatcagatttagacattggtttttcttcaatgcataacaatgattgaatatggccctcaagttcagaggctttagcatgagcttccgcaagaactttattttgttctttctttagagtatcaatttgtgagtttataaagtctggacgactaatatttggatatgggatttctatatcatgaatagcgacaactgtaccaaagatcgatgcatttccgtgtttacttgcgtcatgtggtaagactgtgatgttcatttttcgtgaaatattattttcgatagcgtgaacatagagctttacttgtattgtttcttgttgtgctttcatagcaactcctgatatattgttagcgatcaatgatggaaatcattggtcttgcctcttctaacgagttggtcctcgttagtagaaactcccggttagctttggtcggcgatccggggtaaaagaacccgccacttcggtgggtttttttacatctgttgattcttagtttttccccatattggtattagttggtacggattgatcaacgataaataccattcagaggttatggttttaataaatgtttcaaacagaccgatgaattggcctaatttgatattctgcatatcattacacataagaactgttgttcgattggttaatgtgcgggtctttccccgccgtccgttgattcacgcagtttctaagaaacccggcaagaagaaccgtaacgcatcaactgccagtgtttttgtaccattcccaccgctggctggggaatcctggtgttggttgatctttcctgttccactttctggtaaatacagttgttatatgtggtaatcatggcaggtcacattgaaccctgctcttctcctccctcatgacaattgaaactgtaaattcggttttgaacacttaacctaaacggctgctgtgccgtgctactgattagcaaatcatctacctcttcgtatgtcggtagcgactactgcgtgggcgtcctgcctgtttgctgttgaaattgagtttagtaattgataaacgaaaagtaaagtaaaaattaaataataagaggggcttatcaaagtgttaagtttaaccatttgatttattttaatttttatatttatttcaaggtgtgaactgaatgaattttcccttggtgatagcactgtgaaataggatggccaagatagttttagagattcgctatgcatatagcatgatagtttttgggtgttggctgaaggttaattaatttttggattgggtgattgaggttaacggtttattccgtagggttcagggtaagataaaaatcttgttgataaataagaaaaaagtcggatggcgacttttttctatgctttcttttgcctctttttatgtaataattcttctagtaaattatcataatgccgttttttatcttcaagattttttattagatcatcggcatcactatctggcagttcgtcgaatagctctagaagaactttttgcttaggagtcaatgttacttgtagtggatttcctaattggtgggtgtttgtatcggcgtctaaataaccatctggcattcgatagtcttgttctaaacgtctcgcggctttttcgccgaaagatgctttaccattcataagctgtgacaaataactcttctctttttcaggaagagttttatcggaaaaccaatctcttaggcgttgttgcctgatgttcttcatgctcattttatttataagaacctatatatctagggatttcactatttttctaccagttaaattgtgattagtattcactaaataagcaaatgcttgacaaatgtttagtatttattaaactttctgtatttctaaaaggggtagttatgaaactaaatgattacatttctaatttaaagcgaggtgaagccaaacttcttgctgagaagcttggggtatccagttcctatttatcgcaaatggcacatggttatgctccagttcctcccgccagatgttttgatatagaaaatgcaaccaatggaaaagtgacaagacaagatcttcgtccccatgactggcagaaaatatggcctgaaataaatgctaactgagcagtcagtataaaaactgattctcaataatcaatattgcgacaggagacgtaaacagtggaacaaaacatcaacgccctgaaagccgaagttgaggcgtgggcggcagagaaggggcaggagtatgtagcaatcgaaataagccgaatgtacttcttgctttgtgaaagaacggtatcagccaagttgcatcccattgaaataaatgggaatgctaattggaaagctatcaataacaacaggcagcaaattttcaggtggttgcgcagtgattcaagggctgcacgaagaaaagtatcagagttgttacccgctatccaatcagcccttccacttgaacgcaaagccagaattaacggtgaaacaactaattatttgatatctgttgcgattcgtgaatttacggcggtgataattgcaatcctattgggaggtttaggaggtagtgacgtatcacaacaaataaccgttgcgatatcagcactgaatgctttgacaaacgtttaaaagaggcaagaccaatgcttaaaaccatagaaaagatcacctattgtaataagtttcgtctgaatggtgagcttgtaactatagaacaaatctcagaaatttatgaaggatgtagagaagctgagttaaatatctgggaacagtatgaacggcaaaaggccaaattgctggaggagtctcttacctttgaacggtgtaagtcagtttgccgtcagattgctaaaatacttggagcttgattatgagtatgtcattgatggtaaaagctatgagtatcaaagttggtaatcctcttcgtaaattggtactgattaagttggctgataacgctaatgaccagggagagtgctggccgtcagttgcttacattgctgaacaatgcgaaatatcagaacgttctgttcaaaatcacattaagcaattggtaaaagatggcattgtctgtgttgcagaacggaagacacaaaatggactgaatcaatcaaatgtctatttcctgaatctggataaatccagtcatggctatagtgaaaatgttgcaccatatggtgcatctcttgcacccagtggtgcaaattctgcgggggttagtggtgcaggagatgcacccagaaccagtcacccttttgaaccagtcacggaacctaaaaccccccttaccccccgtaaggggaaacgggagaaattaaaattcgatcccatcacggcaaagcctaaaaacgttagcgatgaagtatgggctgattgggtcacttttcggctagaaattaaaaagccgctgacagaaaccatgtgtaagcagcaagagaaaaaactagcagattgcacgaatcctgattcagtgatttgcacgtcaattgcgaatgggtggcaagggttgtttcctgaaaagtctcaaaacatcaaacctaaatttactcaaaatacgcatacaagctatgagggtataacctacgaaccacaggattcttattggtcagaaaatattgattagggggagaaatgaactctaatagcttacttgacagtatcaacattgccccacgttttgaacatgccagctttgaaaattatcagcctataaacaaagctgctcaacataatctgaagatctgccaaagttatgttcagacttggaaagaacgcaaagttgcgggtgaggggatcatcatgtgtggccgtcttggtaccgggaaaactcatctggctgttgcgacatgccgtgaaatagtcactcagaacggtatcagtgcgtttattacaaccgcatcacgtattatcagggcatttcgtcgttcatggagtaatgatgctgacaccaacgagttcgagacactgaggttttacagtgagttggatttgctgatcatcgatgagattggcgttcaatacggcactgaatcagagcgaaatatcttgtttgaggtgattaataaccgatatgaagatttattaccaacgatcctgatcagtaatttgccaatgaatgacctgccggtgtttttaggggaccgagtattagatcgtgtgttacagggtggggtagtgttggcttttgactgggatagttaccggagggggcagtagtatgaatgagctcaatctagagtctgcggttataagcggattgttgtcaggtggtgcaacgcaggatgcttatgatgtttttgcaacgttgtcagaagaggcgtttagttcaagttttttgcgtcgtgtctacgttgaaatcaaaaaacaagcgttcagtagttccctgattgatccgatattcatcgctgaggctatgagtgaagatggtaatacattagctaatatcctggagttgagtaagagtcctgtttggaatgcaaacctgaaaggctatgccaataaagttagtgaatattggtatgttcggcgggttacagcagtgatcaacgctggccaacaggcgttactggaaactaaaaatcatactcaagcacagcatgtcataacgggctttatgtccactatgggggagctaatacgagatactggcaacctggctcccgtgcacatcaagacattgattgaagggtacattgacatactggggaggcgtaacttaggtgaggatagtcgcgggatgattatgacaggtattgagccatttgactcgttgacagggggatttaacccaactgatttaattctcatcggtggtcgtcccggcatgggcaaaacagaactggcactttgcatgattgagggtatgactaggaatggaggggcggtattgctgttttcaatggaaatggcagcacaacaaattacagaacgtatagttgctggttctgcccagttgtcagtttcgaaattgagacgtggtgaattttatgatgaagattgggctcgtatatctaacgcaataagcgagttaatagatcgcgatattcatattcttgatgctagtgaattaagcgctgaacagatatgtgctatcagtgaaacgcataagcgcaggtacccgaatctgaaaggtatttttgttgattatcttgggttgatagaaaggcccaaagccgagcgtaatgaccttgctatcgctcaaatatccagggccctcaagggactagctaagcgattgcatacacctgttacagcattgagtcagttatcaagagacgttgataaacggcctatacatcagcgtcgccctgttgcagcggatttacgagactcaggtagcctagagcaagatgcagatcgaattatttttacttatcgtgatgttgtttataacccactaagtccagccagaaattatgccgagattattttggataagaatcgtcacggtgaaaccggaacgatattccaggaatttaaaaacgggcattacttaccaactgatcaaattgttgctgctgaaatatgtcgtacacagcaacaggctaaacaaaaagagcgccgatacgcagacaaagcattttaactaaagaccaaaagaggcagatcaaaatgaccataaacagtaaactgattttattagataatttgggtagttatgaattatcccgttttgggtgcagtgctgaaagcatcgttatcttacaaatttagacttaaaagctagtcgattcaacgtaaacgccagcaggatgctggctttaccaaaattgctggtggataactaggagctggagatgctgaagcgcaattgtactcttcgaaggcgggagaaagcctttctgtagctgaatattgtttttctagtgaagtggcctgatggaacacactgggatggtataagagttgaagttgtatttgtaacgtacaaattacatatcaagtatattgcttgcgttcaaaacgaaaaaaaaataccataaaatctgcttaacgcaatcagggtatctaaatgagcattaacgacacacaaagtgatattaccgatttgataataaacgctttcaggcgtgatttttggcttaacgtacaagatgcattatatgctaagtatgctgcagcacaggaagtaactgtagcaatatattaaaacttggtgaatcggagcaacgtagatttaggcctcaggctaggcactatggccttaattcagcattgagggaggccgcaagtcgctctggttatctttgttacgatgctgatacatccccgaaaggggagcattacattattatcgattcagaaggtgttaaaattagccgtattgggttaaatcacgatgagcgccatataagaggtgctaaacatcgttcattgatagcccaattgaatgaaaaatttgaaggctatactccagatctttttagagaagaagatagtaaacatcataatgacattgatacgttaggtgtgttgttaataaatattaatccaccatatcatgaatctcaggccagcatgatggatttaaggattgtggttccttttaccaatatgaaaggttttcactataataaatctgtaacggagcttttagccctctatactggagagaagaagatagtcattcctgatatggttttacctaagctcaagaagcgcctgaaggatcaggaaaaatagaataggtgagacattatgagagtgggaatttctggtttccaatctgaaaggttgacacagataagagaagcgaggggattatcgaaaattaaccttggtaggttagtagatcgttcgccatcaactattaccaaatgggaaaacggtaatcattcccccgatgcagaagtattgcatagcttaagtcagattcttaattgcccggtaagttggttcacaaagcctattgttaagtacgaaaaaaaaccagtattcttccgaacactttcaaccacggcaaaagacttatgtatcgcctcagagcgatacatggggtggtttcaagagttatcatgtaagatgcaagaatatcttgattatccagaggttaacattcctcatcttaacgtaaaggattacagagcgatagatgatcaattgattgaaagaatggcttttgagtgtaggaaagcttggggattaggtattgcaccgatagatgatctattactggtaatggagaatgcggggatagtctgttccagatttgaacaaggtagttctgtaatggatggctattctcaatggaatgatttagagaatagaccgtatgtggttttagctagtgataaagataactattatcgtagtcgatttgatgctgctcatgaattaggtcatatagtcttacatcgatatataaataaatttgataatatcaattttaatccaatagaagagcaagcacataagtttgcgtcgagtttcatgctgccggaagagtcattttctgtagagcttcctccatatcctacattgcagaatttcatatctctaaaaaatcgctgggggatgtcggcacaatttatgatccttagagcgagaaatttagaattaatatcttctctggaatatcagaggttatataaaaatatttctgctagaggttggcgaaaaggagagccgcttgatgatcttagaaaaccagagtcggttcgtttgttacctaggtgcttaaatctattattggattctagaacttttagtaaaaaaacacttcttgaggaatttggtttcccaaaaggagatttagaggatttatgttcagttcctaagggattcttgtcagaatcacaggtacttgatttccaatccagaatacaattgaagaatagtattaatatatctactacacaacaagatacaaacgtcgtcaatttatttaatagaaagtaaaattgggaattaatactaacacctgttattctgttcgtatcggcctgaacatctgataacctaaacaaaagctgctgtgtcataactttgaggataagtaatgacgcagcatagttttatcaaaatttcgaatgacaccctgagacctgcgactcccgcagccagggaatacctgcactccaaagtgaagtggggcgatgtgctctatgcggattttaagaaagcacgtaacccacgtttccatcgtaaatattttgcccttctgaatctcggctatgaatactgggaacctgctgggggtaccatttccccggaagagaaagcgcttgtgcgtggctacgtacaatttcttgcacacttcgcgggcagtgaagatgtcttacaatccgctgcggatgaatatcttgctggcatatctaaaaaccgagcccagaatattactgccaccaaatcctttgatgcctttcggcgctgggcaacagtggaatcagggcactatgacatttacgaaatgcccaacggcagtctgtaccgtgaacctcgttcagtcagtttcgccaaaatggaagagatggaatttcaggagctttataaagatacattaaacgtgctttggaactttattttgtatcgcaatttcccgacccgaaacgccgctgaacatgcagcttctcagttgtccgattttatgtaatgagaggcagagccaatggctaaaagtgaaaaacagtggctttctaatgtgacattactgggatgtatctgttgtcggaatatggggttgggagtaatacttgcggaaattcatcatgtgggagcggtacaagatatggcccaaagggctgctcatttctccattctgctgcatcctcgctatcatcgagcgtttgcatcccacgggctttcatgcggcaccgaagacatggcaagcaatccacagtatggcaacggaactattgccccaagttaaaagggaagttgaagaggtacggttatgtcgggtgtgatattttcaacggatgggctgcaattgactcaggcacaagaaatttggttgcaggactggttatccaagttcggtgcatgggtgtattctggcaggcttgataaacgtcagagcagtatgattgctgagcttatggcgacggtatagctgagaggttatccagaacgtccgatatgcaatgatgatgacggaatgttaatcgctagggtagtagaccatatttaccacattgatcgggttgcatttgggatgttgcttagtcgatatgtttattgtgtatctgatagagcaattgccaaacattatcatgcaacggttcagccaagaattatgatccgcagaaatggtatgttgcgtaagcgaaagccatcaatgtcaacttgtcggcgtgaggttgaggaaatattaagagcaacggaatatttgatttatcaaccattgcaagatgcctttataagacgggaacaggaaagaaaatcaagacttttgtcacgaacgtgttgacatctttgaacttatgagccactatttcagtatatgttgtgatagtagtattcgtgactgatagcctcgcccagtgcggggttttttattgcctgaaattcagataagacttgctgttgtcattggtcagagttacatgtgtgtctatgcacaataactgaccaaaggtttaaattatcatgctaaaacatgaagatatgacaacaacagcctcatgtgttttagaaacagtaccaatgtatgactgggtttctattcccgatgtttcaactctgacggggctatcaacaccgcgttgccaattacttttaactcaattttgtctggctggcttgatggaaagccgggacaacgacacctttttcaagcgttgcctttgatggggtgacttcttaagcggtgaaatggatggctggtggagttgacgacaccagccattcgcctgttctgtgctaaccagagagtaagctagtatcgattatggaaaatattgtgaatttaagtggtatcacattaattaatgacgactctctacgatttatcaaaacgttaccagacaactgcatagacttaatcgccaccgatcccccctattttcgggtaaaagagtgtggttgggacagacaatgggaggatgtaacggcttatcttgcgtggctggatgaagtactgactgaattctggcgtgtgctgaaacccaacggcagtttgtatatattttgtggttcgcgtttggcgtctgatacggaaatccttgttcgtgaacggttcaatgtgcttaaccacattatctgggcaaaaccttctggtccgtggcgcaggcagaataaagaaagtttaagggcttatttcccttctactgaacggatcatatttgctgaacattatcaggggccttatcaacctaaaggtgatgggtatttccacaaatgccgcgaacttaagcaatattgatcataagtaagatatttgacagggaactgaaagataattatgggaaaaacttggactaaatgggaagttatggagattcaattgtaaatccttttcagtatttgaaaggcagaccgaacgagaatcatgtttagtctgccatctgattttactaagctcaattagtttgacctgcctattcagactcgttatcgaataacttaccttgcaggcgatccagttcctcctttcgaatacgtttcactacgctgtaaatccattgaatagaaacaccaaacttacgagccaggtcatgatgatttttaccgttaaattcgttgaaaatctcacgatcacggaggctgactttccaaaccatgcccataggaaaatagacattctgaccgccccaaacctgcatcatatggttcgcaacagcttcaccaatttgttcggctaacgcaggctcaacatggattatttcactgaccgtgcaagctgtatgctgtgccagttcgactagcaactcaggacctttgctacgaaagttattcacaccattcatactttttcctcgtgacacggttctgccacttcttcagtttttcaataatgctgctggcttggtctgaatctaaccactgtaaaccatcaatattcgtttcacgcttaatccagtgagctaaggcttgttcagaaccattacgaacaatacctatagatgccatttccagccacaatgcacgtatcttctttgattggggatgactatctaatggacgtgattttttggatttcctaaaggattgaattttaaaaccgcgctttttcatagcttccaaaacgcgagttaactgcgggatatccatttcccgcgtagaggcttttccggtttctgaaagtaacatctggcgatacgtatcctcgtctagttttagatcactacgtgcaatatgaaagtaagctgaataagtttctgttttgccatcttattcatcctctgctatgtactcttgaattaagtaaaccaaaatagccagcattaacttgatactactgagcttggcttttcggtataaggccgttttatccatgagtggtctccagtggctgtaaatcccatgttgccacagatacaccgtattgctgactacaatgtggacaaactaagattaaatcgacaacccactcaccaaattcaggagtttggataacattggcttgttttagattcattttttcaacaggttgtttgcagtgattacatgttattttcataaatgtgctccttacttaattttctattcaaatggataattgaaaaattttctttacctgaattaattgatatttaattaatatcttttataacagctttatttaaataattacggggtgtaagaagccgcagtcgctttaaacataacttttctttctaccatatttaattacctgttacttaatgaatgcttttattaataccaatatattttcttcttttcctcaacaaagaaatttttgcaagtagatcgacaatgaaattccgaacttaatatttacaagacttccatttctttggttatggtatgttccgcccttgttgtaaccaacttgaaattaataaaatcagaaattagtcgaatccgccttgaatatttaatttgtgataaggaagttttaatatgaatattttcaatattaattgctgaatagaattttttatcataatgatatctttagctaacactgcgaataatattggcatcaaccataggtatctcattaattgcagccatgttcatagctgcaataatcaagtttccgatagctaatggatataataaactaacagtttctttaccactatgccgactaagacataaacggtcacggatagcaccaataacgctattatctaaaatcttgttagtcttcatgcctacgcgactaaatttaaaatccagaaatgtttccagataatcattaagaggaaacaaattaacaacttcacaacgttgcactacttcacgaacctcttgattacgttcagatagcttcaattccagttcagactgaccaatcaaaatgatcgataacagttttttaaatccatcttccagttcaaagaatcgtttaaggtgttttaatgtcggtaaaggcaacgagtgtgcttcttctattattaacacatgttgatagccagcgcgtgaactgtctttcaatatcttgtgcaactggcggaagcgtgcttcaggcgatcgtttcaagttttccaatggcgctaaggtattcacaatagcttcaacaatgtttgatgctttcaaggttttaccttttacatcattgtcttccattgctaatacgtagggttcaataacaataacgggggtattttccctgttaatacggtcaataagatcacgacgcagtgtcgttttacctgaacccgattcccctgatactgccagaaaaccaccatagcgggctgtttgatacatggcttcccgtacataacggctatctggagtcacaaaaacatcttcagcactttgaattgcactatcttcaaatggatcacgaaataaaccaaagtgctttttcgtagctggaaataacacttgtttttttagtaacatgttttcctcctcagaaatgagggttgtatttttattatcggtatagatatctgatttattggttgtttgtaccacctcaaaactttttgcggtatcgatacctctttttgccaagaaatcagtaatacgctgacgaattgcatctgcgttctgtcgtggccatatattgtgattaacaatttgagccaacgccgccgctgaaattcctgccgcacttgctgctgcactttgtgttaactgatgtacctgtaactgctgtttaaacaccagcataataatcccccgttaagcggctatttttatttctgcatattccattgataataagagatagcaacatcattccctggaaaaacatcctttatatttcttacgttatgatgagtttcacgaaaacaaactggatcacttttataaataaacctcagttgtattttgagttgtcagtgaaagcagtggatcatgaattttaattgctatttttcttttccttaatatacaccatgaaaaattaattaccgttaacaatattgcatacaacagttgttgatttccctatgaattcatcaaccaactcatcaatttgatctgttggaacaccattaggaaagcgtttaactatttgctgataaaattcaccacgccatgtcttaccatgtgattggaaccgttcacgtaaaattttgacaacatcaacggggttcataagctgttcaattcgtggactatgtaccgtagaggcttgtccacgttttggcatatacgttggtgcatcattacgttcaatatccaaatatggatcaaaccgaccattgaggggaagtgttttcaatttacgtgctatttcagtttcagccgtgttgtttgtccccatgattttctgttcaacttcggctaaattacgttgtgcaattgtttgaggaatggcttggaattcactaccaattacaggtgcgccgatggcaaagccgtactcatctttagtaacttcattaacaagatgaaaagcctcaaagccatcttcaccagtaatgactacctgtgcctcttcgtcacgccacggattgcgggtgatcatgattgaatcaccaacactcaccccaggaacagtactgacgtcatactcacgtcccctgaaagatactcgcaaggttgcctgtactttacggctttctggggtgctaattgccaattcacgacaaacgttaatggcaggtgcttttactaactgttctgctgtgatttttagccagcaatctgtacgggtttgtccatgtcggctatgtattgcactgcggttaaacttcatacgccatagccgtgccagacggttaagttcatcaatattatcaacctgtcgaaagcgtaaaccggattcgaaattgcgttcgatgatgtcacgtgctttttcaacagagcccgtagcacgggcgttacgggccttgtgttgtatcatttgaatgcctaggaccttacacaagttacgtagtgtaggtgctgtcaaagcagaaccggggtcagtaaataaaatttggggtacaccgtgtaatacatctgcgtcaccacgatcttgcattgcgttaatcaacacagaagtaaaattctgactggtttcaccgccaaataagtattcaacatatatccagccacttgtgtgatctgttaattcaaacgaccagacgcgatcattaatgatacgagccagatttttcggcttatttttattaaattcagccacaggcatcatgcgtaatccactgtcaaccccattgtttttattagggttttttaggtaatacaacacacaaattgaggcgtctaattcccagacatgattgggatgcaggctagccaattgtaggctgggcgcaggcattttcaactgttcaggatgaagtttgtactggcgcaatgcacgactaatcgcgtcaatggataacggagaaaattcgcctgttttggtatcaatatggcctgcattaatcaggccatttgaacgcagatcattaacggcctgttcgaggctatataaccgtttccctgtattacgagtggcctccatcaatacccctgagatcaaagttgcttcttcacgtgtcagcgcgctattacctgcatcagaacgtttcttgcgtggctttttgccagaaacttcaccaagttttttaatcaatgttgaacgtgacatacacagctcttcacaagccgcccgatatattgcttctttactgccatgtccggctttatgtgctgcctgtgcaatagaaactaatcgttcggtcattgtggtattcatgttattgcccttatttcttcagtttcttttcaagcatttttttcaactcagatttattcatgtgcctcttccttatccatccattctggtcgttcgaatttttcctcttctgcttccgcactttctttagcccaatcaggaacaatgctgtgttctctgtactcaggcagattaaagtgattacgtaggttacgaattttgacttcaaggtcatcgagtacgcctgccataaacccaacatgactaatatcggtgcgtgtggtatggtcattaagtgtttcaaatccattgaaaagattggtgatagcggcatcaatagcaaaagacaatgaattaacctcttgtgtcaaagctgcaccttcctcttcaggtttttcatgattaattcggcgctgaagtttgtgctggattgcagatttctcctcaatcaaattactaacaagttcctttttttcctgcaccgtctggcgtgagatttccagatcagcgcgtgtatcacgcagggtcttacgtagttcgcggacagacatgcgatcaatatcatctaatgtcagaccagctacagtgccaccttcagccaattctgacagttcatcatcatcttcaagcatcaactcatacagtttggaacgtcccaaaagcgaaaacgttttcgcttttgtttctaatccaggtgaaagaaatttgagtgcagcttgtgccattttttgggcaatacggggttccagaccgagttgatccttaacgatgttaacaaactcgccatgaggttcattctctttaagaataatgagacgcttcccagcttctaacatcgcttcagcactctgagccatgtagaaacgggtttcatggacgatgcgatcacgttcatacggcaaaccatcaccaaactgttccatgatttgcaggcggtgtgttgtcatagcgttgagattgacctgtagatcgtcggcaagttgaacatcttcggccagttttactgatgttgtattttttgagcgtgccattgtatgaatctcttgttaattaatttctgctaccagccaaaacgcgctgattcatttctgtaattttggcttgggtgttagccatttcattagagaacgattgtgctatttgcagtaattgcataccgggtgcatatctgccgctacccagtttttgcgccagcccttcttctattaatgtatttagtgcacgattaatatttgtaggagattcctccagtaattccgctaattcaccattactcatcccagacaaggaatgaccacgtagagccttaagaactcgtaatatgcgcgtaccagaactggaaacgttaattttgcgcatgtcacattctcccttttcaatatgtgataatctgttacatagagtgataaaatagttagcctatatttggagtttttaggccaagttttacggctatctcatgggcttttccgtaattagctttggattgcccattaagaacgcggtatacagcctcgcgcgaataaccgttctcgtttgcccattgagtaactgtgataccgtcttgctgaaagcgctgtttgattttctccggtgtcattgttttatctccagtcgtgcaatgatagtgttttgatatatgccaaattatgtgaacttttattctctttgtcaatggtggatttgtgaactttgattctctttgtgcggctcgtctaaaaaaagaaagaaaacgcctgtctttaaaacaagatgaggcggctcaaatgtgtggtgtatcacgtgagatgtggagcaaatacgaacgtggtgtagccgttcctggtggtgatgtatgggttgcatttgcattggctggagcgaatgttcagtttattcttacaggtacatcctcctccaatgttgtattatctccagatgaatctgagttggttcaatactatagacaagcaccattagctcttaaggttgctgcagtagcggccttacagtcaggactctcgaacgttagttcaacaaagcaaaaaataacaggtaatggaaaccgaattgcaggtagggactataacgagcataaaaagtagttgtggtaaaaatgtagttgcaatggaggtctcatttgaaaattaacggggataacaatcgggtcgcggctaatgattatcatgagtataattataatggcccagagccatgcccatattgtgaacagcgatatttgacaccaggtcgacaatattgccgacattgtgaagctgagtttgaagatgcggaacaacaacgtagaaatcaggaaatagatctacgatttgcgttgatattgattgttgctgttttttgtataggagctatatttcttttactttttaagtttggtccagaagaatggcaggcaggagctgcactggggatgggggggtgttttttcgttatagtatctatattacggaaacatcaattgtagatttattatttatcatttcactttggggataacatctatgttgacgttacacggttcagttacgataattttcgtatttctgatatttggttgtggtgaaatgaatacacaggaaataacagatacatctactatttctacattgaaatttatagtcaaaacagataatccgttagtccaaaaattattgccaactattagggaaatgtgcccaggattggataaatactctgatcaatttactgacatcacagtttacgaaaacagttatccttcacgcacaactatcaaatttcatattgatgaaaatgccaaactgtctaatgattatatggctcatggaaataattgttttcttgatatagaggataacgaaacagttttatccatatctaaatcagcttgccaatctgtttgtttagatcaacagaatgtacctggtggaacattgaaattgaaactttagaaacaaataggatatttatgtctactacaaacatagaaaagtttaatgaaattgtaggtattatatttgggaaactatatgagtcatttcctttaaagatagatcttttatctatagaggtaatcggtgaaccccttcaatattctgatggaacatactctgacgaactttgtactacagtagaagatcatagattttttctggatacagtggattggctcataacgaatggttatttggcagggactatgagctctgaaggttgtcatagagccgtattaacggctgaaggtttagaagttcttaaagtaatccctgacagcttagaaaccccattaggtgatcgtattaaggaaacactgaagactgaaagtaaagaagcattaaggtctttaattagccaaactctcggaataggtttacagtttgtatcccgttctattggcttaggttaaaggtaaaaaatggcaaagcaaatatattgccttgccattctcggttattagaaattacaaataatcagctctttactctgtttagctttccccgtaactttcaagttgtaaccgatattgactacttgcattttcaatcctttgaatgccttacgcatttctggaatatcgttcaccgaaattaccatttcccctcggatggtatgtgctagttctgctaatagatcatagttctcaagtccgaaatctatgccatatccttcggtaccccaatacggcggatcacagtaaaacagcgtatgtggcctgtcgtaccgttggacgcattgtgtccagttcatattttcaatgatcgttcttgctagtcgtaggtgagccattgatagctcttcttctattctgagtaaattaaatcgcggtgggctggtggtggaagtaccgaaagtatgttcagcaaccttaccgctaaacgcctgcttttggagatagtagaaacgtgctgctctctgaatatcggttagcgtttcttcgggggtaatctgcaaccatttatatatttggcggctgaccaatgcccatttaaattgccggacaaactcttccaagtgatgttttattacgcgataaagattcaccaactcaccattaagatcattaatcacttcacatttgctcggtacttttaggaaatacagcgcggcagcaccacagaacggttcgacataacaggtatgctcaggaaataacggtaaaatatgttttgctaatcggcgtttaccaccgatccacggaacgataggtaaagattgttctttcattatccgtaagccttttccattagctgaaaatgagttaggctttcccggtcatcaataatcaatagcggaaagagcctcggttgactcacagtacatacctgtgagttgatagcctacccagtattcgagtgttaggcaggtcgctcttatcctgtcttttacttttctgatgcgctcttaacgccctttaaaatccttttcccgataaatttgcaaaactgtttccatcaacgactacggagacagttcagtgaaaactttcaaatcgtttgtatcacttatcaaaaaattacgcctcggtggctggttgttaacagctgttctattgctgatcactatcggtttagtttcccctcaacaagtccctgttgtgatttacaaattgtcgcttattgctctggctgttgtcttggggtactggcttgaccgcagtttattcccgaaagcaaggcccggtcagtatctgaaatatgatgaaatactcatgaaagaaggaaaatatcccgttcagactggctaccatatggtatttgctgccgttctgatacgccgtgcactgattgttgccgctacctgtctgagcgtagctacagggttgtgattatgaattggcggcagattatcggaattgttttgttgtggtgtagtggtatggtcagcctagcattggctgacgaactgccacaccgttcgcggcaataccgcaatgacttaatacgtgcttctcgtgtgatctggggattgaatgcgcctgtagctgattttgccgctcagttgcatcaggagagtgactggaaatcacgagctatttctcctgttggtgctcagggtatggcccagtttatgcccgcaacagcggattggattagtcaacgcattcctgaattatccaataaagatcccttcaacccaatctggtctatacgggcaatggttcactatgactattggctatggcaacgcattaaagctgccgataagtgccaaagaatggcgatggcgctgtcttcctataatgggggcttaggatggttactacgggataagaagaaaaccgaggcagttggtctcaatccgtgggtctggttcggtcatgttgaatctcagaatgctgggcgtagagcgtcagcatggaaagaaaatcgacattattccaaacgcatattactggaactcgcgcctcgttatttggcttggggaggtaccagctgtgccaattaaattatgggctaaacctgttgtattgattttgtcgctaattggcatgttcgctttggcccactggagaggccataccataggctttcagaaagcaacggagacaggaaacactgcattagcacagcagaaagccgaatttcttcagctggaaaagcaacggacagagcgggaactggcggcactcaatgccttgcagcaacgttaccaaatgcaggtcaactcagcgcatcaggcagaagccaattatctcaacgatattgaacaactccgcactcagaaccaacaactgaagaggaaaattgaccatgttacccagagttggatggatgaaaaacaacagtttcatcctgttaattgtgtgtttactcgtggcttcatgcagcaatacaacgccgccctcggcctgtccagtgaacaaactcgctctgtctccgttacctccggcgctgatgaaacgttccgtggaaatgaaagctctgatgcccaactacggccatccggtatcacacaacgagatatccttgccaatatcatcgataacggagaacagtgtcttgcattgaaagcgcaggtcaatggcctgctggattacatcgaaggattacaacaatgacactacagattgaattttgggctgccgtaggttttctgctctctttccttggtttcgtttttggtatcgcaaagtggttattcagcaaagccgaagagcgacaggaggaaagacacgcctcgttagagcaagcgcttaaaaattccgtagacaattggtctcagctcgaacgtgagtttatgcagtttaaggctgacttgccgctgaattacgtgcgccgtgaagattatattcgtggtcaaacagtaattgaagccaagctggatgcgctttacagcaaattagagatggtgcagcagcaccgaattgccggaggtaaaaatgattgatgttgctcgtgttcgtcgtgaatcattgcgctggagtctgttggtcgcactgaataaaacccgcccatataccgccagtgaaactttgttattggatatatctcgcgcgatttatcctgacgtcactgcattggaattacggaaggaattggattatctggcagaccgtaaattaattgacctcaataaacagccatcgggtagttggtttgctgacttaactcgtattggtgttgatgttgttgaatatacggtcgaatgcagccttggtattgctcgtcctgaaaagtactggagtgaataatggcgcgtcgaagcactattgataaactccctgaagacgttcggcgttggttggaacgggctttgactgaatcaggatttagtggataccaggaactcgaaaccttgctgcgtgatcaaggttatgtaatcagtaagtctgctattcaccgttatggacaaaaaatagaaaagcgatacggtgcaatacgggcagcaacagaagcagctcggatgctcacagaaggtgccgtggatgatcaagatgcacgttctgaggctgtgattgctttaattcagactgaactttttgaaagtattattcaacttcaggaagctgaaaacggagagattgcgccaaaagagcgcgtcacactgctttcaacggtggcaaaaaacgtagctacactttctcgtgctagcgtgaatctgaaaaaattccaatctgaagtccgggcacgaactgaagctgctgcaagtaatgcagagaaaattgcacgcaaaggtggattatctgccgaagcagttgctgcattacgtcgggaaatattgggaattgcgacatgagtcagcttgcacctgttctaccagatacttcctcaatagcagcacctgtcgtcttattgccataccagcaacgatgggtggccgactcgtcttcttttaaagtcaatgagaagagtcgtcgaacgggaattacttgggctgaagcgtcagataatgtactcatcgccgcatcttctgccgctgcgggtggcatgaatgtgtattacatcgcctataaccaagatatgaccattgaatatattcaagcctgtgcaatgtgggctcgtgctttcaactatgcagccagtgaaattgaagaagggttctgggaagaagacgaagatgataagcacatcaaaactttcactatcaaatttccagattctggattccgtgtagtggcgctttctagccgtccgtctaacttgcgtggccgtcaggggatcattgtcattgatgaagctgctttccacgaacagctcgatgaattactgaaagcggcgctagccatgcttatctggggcggtaaagtgcgagtgatctccacccataacggggatagcaacttgtttaatgagttgctgaacgatatccgggcaggacgcagggacggcgttatccaccgtattacctttaaggaagctgtggctgaaggactatttcaccgtgtctgcttacgtaccggacgtgaatggtcacaagaggttgaacaacagtggatgatgtcggtgtacaagttctacggagctggagcatcagaagaattggactgtattcctgctaatggtggtggagcatggttgtcccgcgctctgattgaatctcggatgtctcccgatacgccactgctgcgactgacttgcccgaaaggatatgagcttaaatccgatgaaatacgccgcacagataccgaagagtggctaaaagccaatctgaaaccgttgttagatgcattgccttctgatgctcgttcgtttctgggacgcgattttggccgcagtggtgatttgtccgtggattatccattgctgcaacaaaaaaatctggtacgcagagtgccgtttgtgctggagctgcgcaacgtgccatttaaacaacaggagcaaatcacttggtatctaatggatggacttcctaatctgctgggtgcagcctttgatgcccgtggtaacggtgcttatctggccgaatatgccgtgcaaaaatatggcgtcagccgtgtgcagcaagtcatgctcaccgaaggttggtaccgtgacaatatgcccccggtgaaggctgcgctggaagacggcaatctggaggctctaccaaaggatgaagacactttggatgacctgagagcagtacaggtcattaacggtgttccccgtgtacctgatcagcgctcaaaagcaaaagcggacggtggcaagcgccacggtgatgcagcgatagcccttgccctagcgtacttcgccagccgtgaaattaacaaaggtccggtgaaggcaaattcccgccgacgccgtcagtctgcacgtatgctggagggatactaatggctcgtggtatctgggtttcaccaacagaatttattaacttttccgaatcaaagcagtcattcactgaacaaattgcatcgcgtagccgttccattgacttctacagtctgggcacatatctacctaaccctgatactattctcaaagcccaagggcgggatattcgtgtctatcgtgaattacgtactgatcctttagttggtggatgtattcgccgccgcaaggccggagtgaaagcactggagcgtggtgtagaacgtagtaatgcccctgtgcgagtctttaactttatccgtgacatgctcgcggacttggatatgtcacgtatcattggcgaaatgcatgacgctgttctatacggctatcagccttgtgaattgatgtggaaccagaatcaatcatggtcagtgacggatattgttagcaaaccgcctgactggttccactatgaccgtgataaccaactgcgttttcgtgcccgtgatgcaggcgtagaaggagaacgggttcctctctataaatttgtaacaccacgtcaagatgctacttatgacaacccttatggatttccagatttatccatgtgcttctggcccgtcacctttaagaaaggcggcatgaagttttgggtacgctttgctgagaagtatggttcaccgtgggtgattggaaaacatccacgaggtacgccacaaagtgaaattgatctgttattggattcgatggaagcgatgattgatgatgcagttgccgccattcctgatgattcctccgttgagattaaagaggcagcaggtaaatcagacagcagtgatatttaccagaacttaattaccgttgctcgcagtgagatctctattgcgttactgggacaaaaccaaacaaccgaagcaaacagcaataaagcctctgcacaagcgggattggaggtaacggatgatattcgtgatgctgatgctgacgttatcaccagcgccattaatcagactatacgctgggttgtagaactgaacttcggtaacgttgaatgtccggtctatcgtctttgggaacagcaatcggtagatgaaacacaggctaatcgtgatgttaagttgagtcaggctggtgtcagatttactccgcaatactggaaacgcgaatatcaattgcaggatggggatattgatgaaacaaccttgtcaaccacgcctattccaccactcccactggcgttctctgaagctgttcacgcagatttagcagcacaagacaccttagatgaagcactggatattttgatgaatgaaggatcattgaatgaatcattggaatctctgctgcttcctttgttctatcgtgttcaaaacggtgttaatcccagcgatctaacaggagagttagccgagctttatccacacatggacgcagagggtttgcaagagcagttagcacgggttttgtttgtgtctaacatctgggggcgcttgcatgagcataaccacgcctgaactggcgtattgcatgacattacctcccaagcgagccattggttatctgcaatctaagggctacaagataacgtgggattgggaagaactttggcaagagactcatgcccgtgcattcacggtggcgaaagtcacgcgtctggatattctggaagatattcgccaggcgctacagcaggcactggatgaaggcaagactgatcgttggtttcgtcaggagctggagccaacattaagacgtaaggggtggtggggaacgaaagaaaccgatgaccccgttacaggggaacgtgtcactgttcagcaaggtagcccgtggcaccttgagactatctttcgtaccaacatgtcggtgctgtacagtgcaggccgttgggccgaacaaatggaaaatattgatgaccgaccgtactggatgtatacagggatcaacgataaccatacacgcaagagccatctcgcattgcatggtttggtatttcgctctgacgaccctttttggcaagccttctatcctcccaatggttggcgttgccgttgcagtgtgattgccctcagtcatgatgatgttcgtgccagaggggtgaaagttatgcattcaggtaaagcaatgggctgggagttgaaattggtttcacaaaaaacaggtgagatgcagcctgttgctacattcaataccggcataacaaaagtagcgactgatgtaggttggtcatattcgccgggggcagcatatcgtcccgatttggccagatatcatggggagctatctggactggcccgtcgcgaactgggaagacagaatgagtaatatcactatcaccattaatgatggagacctaagacgtggactgcgggcattagaattggctactaatgatctgacacttgccatgcgtaaaattgctggaacattgtcagcagaaaccgcttttaactttgaagccgaaggacgcccggcatggataccctcagtggcggcaaaagaacgtggtggtcagacactgcaaaaaactgctcgtttgatgcgttcagtcagtacccgatatgatgctcacacggcaattgtcggtacaaacttagtctacgggcgtattcatcaattgggaggtaaaactggccgcgatcaatctgtattgttaccagcccggccttatctgcccgtaacagaacaaggcgaattatcaccagaagcagtaagagccgtattaagtaccattcaacgacatcttgaatcagcggcgcatcgttaaactgtgcttccctatgcgggtgatttatcattgtcatccgcaaaaaactttataaagcgtttacagactcaaattttcggtatctaattgcatgcagttctccacttttctatttccttccccaatccttttctaaagcagattaaaagtcgttttttctgattgtagtgaaactgtctctattaacgtaatagaggcagtaaaatgaagtcacttcacattttcaaatccggtacacataccgatatgaatggcaaacaattgccgttcagccccgcagatttgcaagcttgtgcaaaggcttatgactcatcgttgcatgaagcaccgattgtgattgggcatccaaaagacaatttgcccgcctatggttgggttaaatcgctgacatcttccggtgatgacttgattgcggagcctcaacaggttgatgttcagttcgctgaattggtcgatgcaggccgctataaaaaaatttctgcttctttctatttacctgattccccaaacaaccctaaacccggcgtgctctatttgcgtcatgtcggctttttgggggcgaagccacccgccattaaaggattgagacaggttgaattcagtgaacaagaatatggtgtcgtcgagttctctgattggagtgatatcaccaacgcttcactttgggggcgtttgcgagaatttttgattagtaaattcggtatggacgaagcagacaaagcgcttccttcttggcaggtagattcattacgtgaagaagcttatagcacgactcagcctgctcctgcctttcatgaacccaataacacacatcaacatgaggaaaacatcgtgacaaatgaagaaaaaaaggcgctcaaagatgaaaacactcgcctgaaagaacagcttactgcccgtgatgctgccgacgcaaagcgcaaacaaactgagcaacatgccggaaacgtggcatttgccgaaaagctgatcacagacggcaaattggcgccagctgctcaatctatcgtgatcgccttgctggacgctgtaacccaaggagattcccctgtcgagtttgctgaaggtgatgtgaaaaaaccattggctactgcgtttaaagatctgctgagttctgtccagcctgttattgattttggtgaacatgcaacaaaagaccgggtagaccaaaacacatcatcagatattgctgagttttctgatgcagatcctgaacgtctggcgttgcatcaaaaagccgtcgctctggtgaagaaagaaggcatcagttacgacgtagccgttacccgctgcctgtaacactagggacgtaattattgaggagaaataaatgtctgattatttgaaaggcaaacgtattgttgatcctgtgctaaccagtgttgctcgtggttataaaaatgcggcattcatcggcgaacatcttttccccgtcgtcgaaatggagaaagaaggtgctagtgtgccgacatttggcaaaagtgcttttgtggaatatgacaccacgcgtgccgttggtgccaacagtaacgttttgatccgtgagaaaggctcttcgttagatattgtgctcaacgaacatgatctagctgcacctgttgattatcgtgagaaatcagaatccttatttaatgaagaagcaaaggcaatccgtcgttccaccaatggtgtgaacctcaagcgcgaactgtatgcagctcgattggcacaagaccctgaagtttatcttagtgactcggtgaagagtctgacagctaatgaacgttgggctggtggcaaaggtaatccaatcaaagtcattgaagctggagttgatgctgttcgtactaccattggtgtacgtccaaacctcatgacaatgggggctagcgtgatgtcactgttaaaatttcatcctgaaattcaggcagctattggagccaacgaacgtaaacgtatcacaatagaaatactcaaagaccttttccaaatccaaaacgttgtcgttggtgaacctgtttctactccaagcattaaagaaaatcccgttgatatctgggctgataatttgatgttgcattacgtatcacctccgcaggcaggagcagaaagtgctgatgagcatgaaccctcctttggctatacgttccgccgcaaaggaatgcctgtagcggataaatatgaaggtgtgggcggtaaggtcaattactgtcgttataccgatatttataaagttgcggttgttggcggtgatgccggctatctgattaccaatattgtgaagtaagggagacatcatcatggcagtaacacaacaatccgtattgacgacaacaattatcgccagtgcgaacatcatccagcatcgtttagttagtactgataatgcaccgtgtcaggctggagccgttgcacttggtatagcagaggtggatgcgaaggctggagatgtcgttcctgttaatgtattgggcattattgctgttgaagctggtgggccaataacccgtgggcaagtcgtacagtcggataaggatgcctgtgtggtaccactgagttcggctgaaaatgctgccggaacatctgtcgggtttgcgctggatgatgccacagcggcaggtaatatcattcgcatcttacgtggcatatgacatgtattgctcactgaaagatttgcaagagcagataccaacgcaatcattgatatggctgtctaacgaagaacctaatgctcagacgatcaatgagcctgtggttaacagtgccatccgctatgccgatgaactcatcgatgcccatttacgtgggcgttatatcctgcctctggcggaagttcccacggtattacgtgatgccgccattacgttaacacgctatcggctgtatgcccgccgtccagagggttctattcctgaagccgtgatagatgattacaaaattgttttgcgccaactggctgacatccgagatgccaaactaacactgggcctgctttccacaggaaaagatgcccctgaaccgggggagtttcgtgttcgggcgcgtcgtcccacctttggagggagtaaaggaatgttggagaaatactgatggatgtttcgccgatcattgatgccattatcatgaggctaagagaaaaactacctggcttacaggtggagtatttccctgaaaggccaactgaattcaggctgaaccatccggtgggagccattttaatcagctatcccggttctcgcttcgacaagcctgaagatgttggggcggtattgcagacacaaactgtcatgctcaatgccaccatagtttttcgtcagcttaatggacgtcacggtgccgttgccacattagatgatgtacgccgggttctcggcggattccaaccaccgaactgccaacgaaaatgttggctggtacgggatacatttctcggtgagatagctggtttgtggcaatacacgctggattttgcgactgaaagtgtatttatcgaagactgtgagttaccgaatggttcgccgttagcccaaatcaattatgagggaactgaacaatgaaatacctctatacaggcccagcaagcggcgtcactttagctgatggcactgaagttttgctctggtcagaaaaaactgttgatttaccagagcagcatgattatgtgaaaacattgatcgcgctgagatatcttcatccactgtcagaacagcaaaaaaatcccctgaagaaaaaagaaaagcctgaggaggccactgatggccgctaattatttgcatggcgtcgaaactatcgaaatcgaaaaaggctcgcgtcctgtcaagacagtgaaatccgccgtgatcggcttaattggtactgcaccgatagggccagtaaatgcagtgacactttgtctgtcagaaaaagatgccgctcaatttggtactcaaatgaatggttttaccatcccacaagcactggatgctatttatgatcatggggcgggaactgtgctggttattaacgttcttgatcctgaggtgcataaagctaatgttgccagtgaaagcattagctttgataaaaccacaggaacagcgaaactggctaatcccgtggtcagtaatgtcttactaaaatccacctctggtagtgccccttatgtagaagggcaagattattctttggatgctcaaacaggcagcctcaagaatatcggtaaaaacattgctgcgggcgcaaccgtgattgccagctatgactttgccgatcctacattagtgacgcctgctgacattattggcagcatcagtgcagcgggtaaccgtacaggtatgaagttactgaatgatacttataacctgtatgggttctttgccaagattttgctggctcctgtctactgtacccagttaagtgtgacaacagaactgattgcccttgcaactaaattgggtgccatgacctatattgatgccccgataggcaccacttttgttcaggctatcagtggccgcggcccgtctggcacaatcaattttaataccagttctgatcgtgtccggctgtgttacccacacgtcaaagtctatgatgcggaaagcaatagcgagcgcctggaacccttgtcatctcgtgcagcagggctgcgtgccaagattgatgcagacaaaggtttttggtggtcatcctccaatcaagaaattatggggatcacaggtattgagcgccagctatccgccataattgacgatccacaaagtgaagtgaaccagctcaatgaacaagggattactacagtgttcaataattatggctctggtttgcgcttatggggcaaccgtaccgccgcgtggccaactgtgacacacatgcgtaacttcgagaacgtgcgcagaacgggcgacgtgattaatgaatccctgcgttacttcagtcagcaatatatcgatatgccgatcacgccagcgctgatagatgccctgacagaatctgtgaatgcctatggtcgtaaattgattgctgatggcgctttgttgggattcaaatgctggtttgatccgacccataacgaagaaacggagctggcatcaggtcatctgttactcagttataagtacacaccgccaccaccactggaacggctgacatttgagaccgaaattacctctgaatatttgctgaatttaaagggaaataattaatggccggaaaaatagagattaaccgcatcaccaacgccaatatttatattgacggcaataacctgttgggacgggctgaagaagtgaaactgccagacgtttccatgaccatgcaggagcataaggcgctggggatggtcggcaaagtggagctaccggcaggcttcgataaactggaaggcgagatcaagtggaacagtttctaccgtgacgccatgttatctgctgccaatccctataagtctctggcattgcagtgccgttccagcgtccagaaattcagttcacaggggcgcattgatgaagtgccattggtgacatatctgaccattttatttaagaagaatccgctgggcacatttaagcaacatgaaaatgctgatttttccagtagctttaccagtacctatattaagcaggtactggatggtgaggagctgttagaactggattatctggccaatatcttccgtgttggcggcattgatcaactgaccgattatcgcatcaatattggaggttaaactaaatcatgactgcactcgctccaaagccagaaagcttgccgacttgattgataagtggactcctccggaaggttggttttccgatatcggtgcagcgaaagggaaagaatatctgatagactttttccgtaactgtagaggctttcgcactcactaatgacaggggcatcagcccctttcttctttaatcccctttaatatttccgtttccatacatggatgatactgaatgaaacttacagaggagtatcatcatgtcaaccacgacttaccatcttcaatttccctataccacggctgctggcgttcgcattgaagagcttcagttatcacgtttgaaagttaaagatatcaaggctgcccggcgagccagcgaaaatcctactgactgggatgatattttgatagcacgttcgacaggattgttaccagaagatatcgaacagatggatgttgctgattatctggcattacagaaacgatttcagcaagttatcggattggatcagggaaataaaaacagtgtggcaagcatcggcgatgttggcacgatggttccggttccagccgagcgagattgataatctggcgctggatgaatttgaatgttggttgaatgaggccaacacccaaatcaaacgcgagaatggaggcggttaattcgtgtcaacagaattttccattggtgtcattattggtggggccattagtagtgcgttcagttctgccatgtctggtacacgccgtactctaggaacactgggagaaacgactcgccaactggagaaccgacagcaggcactgaaccgtgctgttgaacgttacggtcaacttggttcccgtagtgcccagcgtttgaatgcggatctacaacgcatcagtcgaacgctggaacagttgaaccgccagcaacagcgcttacagtctgcggctagcatgagtgatgcagccaaagcgaatcgtatggcgctatatgcacagggagccgaaacctatgcattaactcacacgatatcctctcccgttgttcagtccgtaacaaagtatgcctcttttgaatcaggattaagggacatagctgtcactggcaatctgtctccgaaagaagagcaaaaaatcggaatcatcttgcgccagaacgccaagcaaacaaaccaattacaagaaaccctgttggaaggtgttagcacattggttgccgccggaaaatctcccatgaaatcgaccgatatgagtggattattgggccgcgtcgccacggcgtccaaagctaatattaatgacttagccaaaatggctctatcctttgagtccctgaaaattggaggtgatcaagcgctcaaggaagcctttaaccgagccgttttcggtgctaaatcgggtcgttttgaattaaaagatctcgcccaatactttccagaaatggcgcagcaatttgctggtaagggaatatatggtcaggaggcagtttcacagattattgccagcttggaagttggccgtgaaggcgcaggaacggaaggtgaagcagctaccaatatgaggaactggctagcttcaatgggacgtggtgatattgccaaaagatacgctgaagctgacgtcgattatcaaacctcaatgagcagatatgtttcttcggggtactcacaatatgaagcctcaatcatgatcgcagaccgctttatcaagagtaaaggcgctgatctcatgaaagagtggaaaaaagcgggagccagaggtgatgaagatgcacagcgtatgctcatggaatccttcgggctatcctctattttcaccgacgtacagacagtcaaccatctcttggccatgcagcaacgttggggagattatcagcgtatcaaaacaggcatgggaactgattcggcacaaaaatctgttgataccgattttgataaacagaatgataccttagaagcacagtggcggcgtactcaaattgaatttaatgattcggctattagcattggtcagtcgctgcgcccagcattaatacagttagccgaaacctttattccattgatggacaagaccggaaaatggctggccgctaatcctgaactcatcagcaatgttgtcacgctggtcggtgggttcttggcattcaaagcagcttcaatcggtgtcagattaggtcttaatcttttgctttcccctataactgatatctggaaaggtgcaatgttaatgcgcacacggtggttactgcttcgaatggctatcggcagtggcggcagatttggtgtcgttgcaaacatcttgggaaaaatagccggagcagctctctggttgggtagaatcctcggtagtgctctctataagggcttgatggtagctggcagagctattttgtggattggacgcgtactattaatgaatcctatcggattgatcatcactggtattgcagtggccgcttatcttatctatcgctattggaagcccatcagtaatttctttaaaccgctttggatcttagtgaaattcgctttccaaatgggatggcagggaatcaaaaatatttggtctaacgtcaaaggttggtttacagctcgatggaatgacattactaatgcgtttgatggcggaatatttgaggtcagtaaattaattttaaattggtcgccattgggattgttctataaaacattcgctgacgttatgaaatggtttggcattgatatgcccgataattttactgactttggtaaaaatatcgttaatgggttggttaatggtatttctaatatgctgaccacggctaaggacaccattaaaaactttggtggcaaagtttctagctggtttaaagaagcgttgggtattcaatcccccagtcgagtatttatgggatttggcgataatattgtgcaaggtgcggttgttggtattgatcgcactatgccgttggctgctcgtgccactcagcgtctagctgagggaatgaccccagatgtcccacaaatctcacctcctgagataatgtcgggcaatccaattaaacgaacaggttataaagatgccagcaacagcaataatggtttttctatctctttcgccccgcaaatatacattggtgataaacaacaaacggctatacccgatattagtcaagctttaaacctgagtatgcgtgaattagaaaaactgctggagcgtattgttattcagagagaacgccggaggtacggataatgtttgctgtattaggtgatattgaatttgagctaatcacatattgggatggttttgatgtaacgtttggtgttgattatgccgaacatgcccgaattcaaggtaagcccggcttgcagtttgtaggtgagaaaccggatgaaattcaaattagcttggtctttcatcaacattattgtacgccggatattgaattgaatcggctgcgtgaagcaatgcggaaacatcaagcacttgcgctaatattcggaaatggtgattaccgtggctggtttgttattactgatgtgacagcctccagtgaacaaacggattcagtaggtaatatatttgccctcaatgcctcggtgacattacgtgaatatatcggtgatcctaaaaaaccactgaaaccgcctgccattaaatctcatgtcccgaatacaaaggcgttgtctaatgcaataccgaaaccatcaggtatggctaaaaaagtcagggatggagtgaattatgccaaacaagcacaatcagcactgcaaacgacgatcagtgcggtacgtattgcacagaagatgaaagacaacccggccgtagcgttaacccgcgtaccaagtcttcttaccgggctcaacaatattgctggtccattagggaaaagctatccggcttttcaatcactcggtgactcattgccagatgcaattcaattgaccagagcaacggggcaagcagtaacatttgttaacaatgctcaatcgtcattaagccgtgcagatagctgtaatatcgcggctgcattggattctgtatcaactcaacttgaatcagccagttcaacatttacatcaatatcacccgcgcttagtaagatggccgcgcaaattaccacaagggcgctttgatcatgtttcttgaatacattacaagagatggcgataggtgggatttattggctcaccattattatggtgaccctttaggttacgctcgcataattgctgctaatccgcacgttgcagttacacctgtattgccatctgggatcgtattgttgatccccatcattgacgctgacgatgtagtaattgcagaggatacaccaccgtggctaagataattgataccaagcaaacaccatctataacgggtgtctcagaggttttaagtccgacattcacgttacgatatttgcaaaaagatatcacaaatgacatcactccttatgtcactcgtgtcagctataccgacaacatcaaaagcgaatccgatgaaatagaggtagagttggatgatactgatggtctctggctagataaatggtatccgggaaaaggtgatacgttgacattgaagttgggctatttcggagaacgattactgaattgtggctcattctatattgatgaaattgaagtcagtatccctccttctattgtatctgttcgaggtgtagcaacgtctatcaatacagcattgcgtaccaaatctaaccgtggatttgagaatacaactctggccgctattgctaaccgcatcgctaagaaacatcagttaaagctgatcggcagtatcgaaatcatcaagattgacagggtgacgcaatattctgaaaccgatgtggcgttcctgaaacgactggccagtgaatatggttatgccgttaaagttgtcagtgaacagctaattttctcccacttagccactttgcgcagccaagaacccataaaaaaattacaccctcgtgatgttgcccaattttcactacgggacacgattaataaagtctataaaaaagccaaagtgaagcaccaaaaggctgatgataaaaagttgattgtctatgaagctgatggcacgaccagtacaagtagtcagtccaatccaaaagataagaatagcggtaaagaaaccagcgcagacaccttaaaagtaaacagccgggctgctaacaaggatagcgctgaaataaaggctaagtcagcactggatttacataatgagtaccagcagaacggctcactttcattgatgggagcccctcagttaaccgccggaaataaaattgagttgattgaatttggcaagttatctggacaatggttaattacttcagctcaccactcttttgatcgtaatagcggatatataaccgaacttgaagttgctcgtggccctgttacatcaagcaaatccaagaaagataaaaaagataagactcagaaattggttgtatataagcccgatggttcttccgacacgatcatcgaggaggaatccaaatgagcagtgtaactcgtcaagttggtacgattagcgccgtagatcctgctactgttcgtgcccgcgtgcgattgcctgaatgcgataatatgcgtactaactggctgaatgtgttgcagcgcaatacccagaataacaaagactattggttgcccgatgttggggaacaggttgaagtgctattggatgcgaatggtgaagatggtgttattttaggtgctatctattccagtgttgatcaaccgcctgctaataataaaaatatccgtggtgtaacttatgcagatgatgcagctttttactatgatcgtacctcacacaccctgactattaatggtggcattcagcacattaagatcgcagcgggagccaatgttgttatttatgcacagcaggcaactattgatgcgccggaaacaatcgtaaccggaaatatgttagtgaaaggtcagttaatctatcaaaatgggctgtcgggttctggtggtaatagtggtgctgcaaccattcagggcaatgttagcgttaatggcaacatccatgcaacgggcagcatcatggatgaaggtggtaactcgaatcatcattttcatgaatttctttaaacacctttaatattagatatacctacaggggataatactgtcccccatgaatacgaactcacattctgttttttggcaacccgctctccagaactcaggcaaaattgcctgtgggctggatgatatcgcccaagcaatactcattattctacgtacaccacgtggcagtgatccacatagacctgagtttggcagtaatttacacctttatattgatcaccccatagaccgcgcaattcctcacgttgttagggagtctattgacgctattacacgttgggaacctcgttgccagttgctctccgtgaaaccaactgtcaatggagagcatctaactctgcgtgtgaattggacagcagttgatggcattacacaatctacggagttgctatggcgctgacagaacctgattttatcgagcgtgatgtagaaaaaatcacaaccgaaatgatcgcaaaatatgaagctgatgtaggtaagactttgtacccagcacaggcagaacgcctgctgatcaatttatttgcatatcgtgaagcactaaccagaatgcaagttcaggaagccgccaagcagaatttggtcgagtttgcccgtgcgcccattttggactacttaggggaattggtcggagtatatcggctatccgcccaaccggcgcagacaatattgcaatttagtgttgatgaagcattagagcaagatgtactcattccagttggaactcgtgttaatgcatcggacagtattatttttgctactaatacagatgctgttctgaaagccggcacacggttcgttaatgtcacagctacttgtacagatactggattatcagggaatagctggcaaccagcacaaattagtacattgttggatgaaatcgacgacattgacccgcaagtgaccaacacaatagtgagcagtggtggttcggcagaggaaagtgacgagaggctacgtgtacgaatcaaaatggcccctgaatcgtttactaatgcgggcagtcgtcaggcttatcgttttcatgccatgcgtgcccatcccaatattgttgatgtcgcagtcatgtctcccattccgggcgttgttgaactgtttccactattagctacgggattgcctgatgaaagcattttaacgctggtaaaaagcttttgctctgatgaaaaaatccgcccgttgactgacattgtacatgcaaaacctcccgtgaaggttgattataccatcaaggcgaaactgaccttgtacagtggcgttaatgcacctggtattcaatcggcagcagaacaagccatacaaacatgggtagctgaacgagcaacaacgttaggaaaggatattgttcccagtcaaatcatctcaacattgtctgtttctggcgtctatcaagtcgttctggagtctcccacgtttcagattgtagatgaaaatgaatgggcgaactgtatcggtatcactgttgtggtcactggagtcgctgatggttaagttacatctaccacctccactagaagctgatatcagtatgcgtgcattaggtcagttggcctctcgttttgatgatatcgatttaacccaattaatggtttatctcattgatactgccgatagaagcacgctgcattggctggcaaatcaattctccctatttggcgatggctgggagcttgtcgaatcagacaatgctcgccgcacgttaatcaaatcagctatagaattgcatcgatataaaggcacaccgtggtcaattcgtgaaattatccgtcgttttgggtttggtgaagttgatttaattgaaggcactggtcaaatcaattatgacggacatgccagccataacggtaattatgttcatggagattcaacatcctgggcagtttatcgcgtcatacttcagcaacctatcactaatgatcaagcctcgctactgcgtaccacactggcagcgtttgcgcctgcacgctgccaccttgccagtttggaatatcagtctgtatcaattcgttacaacaatactgtcagttatgacggtagttacaattatgggagcagttaaaatggctaatttgccggaaaccccacagtggtcagagggcgtgtatcaaatagaaacctcagaccccgtgttaggtgggcctgatggtatttccaatcggcaggctaaacagttggtcaaccgcacaaactatcttaaacagaaactagaacaaaatgggaatgagttgagggaacattctgaggtgcaagatccgcatactcagtatgcaccgaaagacagtcccattttcacaggaacaccaaccgcccccacaccggctaaaaacgctaataatactcagattgcaacaacagcatttgtgcaatcactgacggatacggcgaatcaaagtgctgtagctgcaaataacaacgctaatagccgagtaccatccattcgtaaagtaaatggaaaagcgttgtcatctgatatttcattgaatgccggggatgtgggaagttatgctaaatctgagagcgataatactttcttgcgtatttctagcgataaaactgcaaccgttggtagtttattgattgatagtaaaactccttttcctaaattgcgtttcaaatcgaaagatggatatatattgggaattaacggttctgaagggaaattattgcatatctattctgacgatcctaagaatcagcggcgttacaatatattaacgcctgagagaagtggtactcttgcattacaaaatgaagccataaaatccgaaaatggctggtggcaatgtggagatacggggattattattcaatgggttaaagttccatcaggtcagcaatcatggataaaggtaaattatccaatttcttttaaaaataagttttttggctatattgcaagcatgtcgagtatcaatacatcaacgggtcacacattagtacgtaatgcaacgttatcgacgtttgaatatcaagctggcactcccaacaacaatgagaatccaggcaaagttgttcatatattattttggggggtataaatggtttatttctccagaaaagaaggcgctttttatagtgacgctcatgaagaatgtgttgaaataaccgcagaaaaacacaatgaattacttgacggtcaatcacgcggctttgctatcgttagtgataaagagggttatccaattcttacaaaacaagcaccgactgtttatcacaaatgggataatgaaaagtggataatatcagagagtgataaaataaagcttagacgggaacagcagcagcaagcagaacagaagaaacagcaacttatgttcactgtaagtaaacagatagctccattacaagatgctgtagatttggggatggcgagtgatgaggaaaattctcggttgaccgctttgaaaaaatatagagtattgctgaaccgtgttgatgctagcttagcgacagatatttattggcctgaaaaacccagagtaatagaataagggctgcaataaactggccccaatagttaggcagtctaagcagctaatatggcctaggttcgatattataccgaacttagaccatttagttgagaattagtcacctagaggaattacttcggataactcgttcaataggttgtccattctcgtcaaaatatcggcttggccaaatttctgagggatgtactccgagattgttcgcaataatccactctcctttaggccaaggtcgtgatagagcattagctaatgtagatgagctaagtccctccttacgtgataccgctgctaaggtagtgccgagcttacgtaaggcagcgataatgtcggcggtatgccaatcttttttattcatttcctttatatctccatataacaaacgcaataaattatcctattttgggatatttaagtaaatggttgatattcgattttgggatattaatcaaggttaaagaaatggcatcgatttattcatatgaatatcaattggttataaacactcttcgtaaagctaggatagaaaaaggtattactcaaaaaagcttggctcaagccttagatcgacctcaatcatttattgctaaaattgaaaatggtgaaagaaggttggatgtggttgaatttgtgcatatagcacacttgctatctgtcgattatgtgctaattttagaaaaaattttgttcaaaaaacaacctaaaaagttaaaatgatcggagcttataaaataaaaaatcccattttggtataaatcaacaatcgattgatatttaatcctaaatgcttagtaggattaaatatatggtttcaatttactctgatgaatatcaaatagttatcaaagcactccgtgaggctcgtatagcaaagggggtcacgcaagagaatttagctcaagcgctagatcgccctcaatcgtttattgcgaaagttgagaatggtgaaagaagattggatgttgtggaatttgttcatatagcacatttgttatcattagaaccaagtgttctcataaaaagaatcccaagaaaatattcctcgatatgctgataactttctatctacgctagtttcatcagatagcgtagctaaagagggattcacatagttaactatattaactatgtggtagaacaattagggtttaatatccctaaagttgttttttatactccgtgttatgcagtatctatacacattttactcggctaacacttaattggagctatctgcgctctttttgcgcagatagatgtaactaaaccggttccgctctaggctggagggggctggtttatgagatcatgaggtcggccttttcagctatagcgatttccccaattttcggagcttcggctcctttaatttgaccaacgatttttacgcattgcgtattgctaacttatatgctgaattccgaaaatgacttcacgtttttcctgtctatacgctcattcttctcgttcggttaggtaaatttgtcaggcgcttcttaataacttcttagtctcaagatagaggtttataaggctaagatagctttacattagaggtaggttcaagttcagctaagatcatagctgaatgcattccaatcattttcatttggtttctgtactgtgcattatgataggggtgttaaccccattttaatgagtgcagaatataccgcctaactgttcggaattggttaccgtgctacagatttaaaggaaaaatgggtaaattgaataaattacagtcatatttacgacgctagttgtgtaaaaaattttcaatagatgaaacgcaattgtcgctttatttatcgagcggataagtgaaatttatcgcgcgcggcatcacaatatgtctttaaaccgcttgtggactactttcgcaatgcacgaaaggtgttgggtgtcacagcaaaagaaattaacgctgccacaggaaaacagatggccagtcactggttcagtgatagccagtggcaattacccaatgaagtggattaccaaaaactgcggatattgttcgctcgaatagccagagaaaaacaccagaacggagaattaaacaggccatatcatgagttagtagaatctcatcttactttgtcacgccaatatgaggaattgagtctggaatatgggctgctgcgccgtccgttctcggtgacggtagatgtgccttatactgatgtctggtcttttccacctgttcagtattacccaggtaaacatccttgcgaaaagccggcagacttgatggcgcatattatccgatccagtagtcgggaaggggatttggtggcggacttctttatgggatcgggctcaacactaaaagcggcactgaagctgaatcgtagggtcttgggtgtagaactggaagaagagtactttaaccaaactaagcgggaaattggggtgatgatatgaataactacctcgctgcggtgaggggttatttgagtttctctcattagttattatggcgaaatagtgaattgctggatagtatttgacggatttcattgtcagaaagtggttgtgatctcggtgaacagagattaactttttgacttgaagtaatgctcttagcgagatctatataagctctaaattcaacttggctgtgtccaccttcattcatttccatcggctgaataatcacatgatggtttgacaaaaaaaagttataccaagtattttttctcactttctttattaattttttaagcaaaaacattgcaggtatcatttgccctagtaataaacgagatgtggtaaagggagtgtcgggggtaccagagacttctttaccagtgctgacgttgcgaacaacaattttattaatatatagtcgtatgtaaattaagctcataaaaatgtgtatgtcaggtaattcaaatttgttgcaagtatacgttcttctcttaatgcagtgaagtctgatgcttattgagtcttttaaatcaatacagggcaaatcagcccaagtaattaaattaactaaatgatcactccatcagtgggatggaattatgcgtatggacaaatacaccagccccactgcatacacttggggcacatttacagcaatgcttggtgctctgtcgctgaacgactgggccatcattattggcattatctgcactgttggcacctttggggtcaactggtactacaagcatcgggagcttagccgcaatgacaaagaccagtaagttaagtgctgcggttatcggtctggttctttctggtgcaggtgccacggcgatattgtctcagttcttggacgagaaagagggtaaccggctatcagcgtatcaagatgcggggggagtctggacaatctgccgaggtgttactcggattgatggaactcccgctcgtcaggggatgaggttaatgccgaatcagtgccgtgacctcaatgcacaagaagcaaagcaggctattgcatgggtaaaacgcaatgtgcgggtgccattaactgaacctcagatagcaggtattgccagcttttgcccatataacattggcccatcgaaatgcttctcttccacattctatagaaagctgaatgccggagataagaaaggcgcttgtgctgagataaaacgttgggtatttgataatggtcgagactgtcgacagaccaaagggcaggcaaacggctgttatggtcaagttgagcgacgtgcccaggaatcggaattaacttgctgggggctggatgaatagacattcgttggccaggatattgtttctgtttggcttctttcttgctttgataggtagagatggatggagctggtttctggggtgttgttgctatgaaatttagctttcattactacactatactagcgttgatccttatttcattgacagcgtattactatcactttgagttacagaaagagcagcatattacaaaacagcggcaatcagaaatccaacagcttacggatgcgcttgattatcaaaactcacatatcactatgctgcgcgagcttgatgtgaaacacactcaggaacttgctaatgccaaatctgaaattgatgctcttcgcagtgatgttgccgctggtcgtcgcaagttgcgcatcgcggcaacctgtagtcaaagtgaagcaggttccccctccggcatggttaatgcagccagctccagattggaagaccccgctatcagggattatttcactctcaccgaaagggtaacaatgatgcaggcacaattagagggcttgcaagactatgttagaacccagtgccgataatcatctgaataactgatgtttttttcttgaatatattggcattatttatcaatataaatttattattcggttttgagttaaattgatgtatactgtttttttatacagttatggtgaagggaggtggaaaatgtttttaagcaaacttgctcgctttgcattaactgcaacttctgtggctcctgtatgcatcacattggcttatttggctttcattcaaaaaaactacattatgcttggtgtgtatataactataggagtgattagtgtctttctctgtattattatattgaaatattctattcatcattcaggtcgaacaaaaaagaatataaaaacagctactccagctaataaagaagtaactaattactttttaacatatttatttccattgcttagtgcgtccgggacattttttgactggaaaattgctgcattcttttacattagtttgcttgcttatgtttctttctctgaaggttatagctttaatccgttattatcattcttcggttataaattttatgaagcagagggcgagacaggtattagttttgtattgattaccaaaagggatttatttttagtgaataacgacaggttagatgttataaagctaacagctcacacatacattgttgtttaattcaaaaaggaaattacttatggaattatttgctataaccgacactagtaaaattgtgagaattgtcacagactcagagacgcaaaaatctgtaaacgccttgtttaaaaaacaaaaagaatattttgaaaataattatacgacatctgtagaatttagtggtggttatattaccagtcctgtggagtatttttgtattgataattttgatgatgttataggtgttcttgatgcaattcagacgcctacctccattcaagagtggagtccgcaggagatatctatttttaatataaaggctctgttttctggtgaaattacttcatctgaaacagaagataatataaaagcttatcttcaatgttttgataaaagacaaataatagataataaaaaaacattgtttcatagtatacttcaagacaaaaatacctttaagctatctgattctgatggtttgattatcgataataagctaaccgcaatacttgagggtaataaattaaaatttaaaagttttcatatgttgaggcgaatattcgatgttgatgggtattttaaagaggccactgatgatgatttaagagagttttctaatcatgatcatttccatatttcaaataattttgaccttacaagtcttgctgatacggtaataagaaagaaagtatcattaataaataaatcaagagtcttagagaattatactgtggatgctttattagcagcagctaatgaaaatggagtggtttttgatttagatatacacgaagataatggcaaaaggaaaattgcaatgccacaagagaaaaaacacattaagaggctattgtgttttctggatgaagattattttacctcgcagattactcaaacattatacaggacaaactctaagaaaaaggttaatcaatcttaatgaatggttattcctccggtacataatagccagtaaataactctaaaaactcaacaccccaatccatcacatctgtggtggttttttatagtggaatatttgcaactaactcttgtggcagaaaaacagattaaaccatttactactgtgtaacttgcaagcttagacataagtgcactgaagttgtcagcttgctgaggtagtttttttagtgaatcatctatcttttcgatggttgatttaaaactcattacagactccttgagagtgtttttgttcatggaaagataaaactacctatttttaacatgaaataagttgagacaagtcacttaatgaaattaaagctaagaatgataatttcatcttttaaacagttacgttaataccgataattcatgctactgcctgttcctatcgcatactaggttatgtccctcaattaaattatggccttaagaaataagcggatacaacctaatttcaccatagcgatataatttcttgctgtcttttcataacgggtggcgatgcgacgatgctctttgagtcgaccaaaacatctttctacaacatttcttcttcgatacgtttcatggtcgaatttaacccgtccatctgaccgcgctttttcatttgatttatagggaattatcacttttattccctgactttttaaccggttacgtaatgcgtggctggcataacctttatcagcaatcaccgcttttgaacgacgtttcataaaaccgtttttacgctgaatacccagaccatccagcaggcgcactgcatattgactttcatgacattgacctgcactgagtaccacattcagtggatagccttttccatcgaccgccagatggattttggagccataaccaccctgagagcgacccaggccatgattttcggtgacatcgggatgttttttttggcgcccgccgcacaatgtgccgcacgaatgttactgccatccagagatatagctgaccaatcaactaaaccttgttcatccagtattgacaataacttattgaaaatgaggttaatgagccccgattttgcccaccgattaaagcgattatagacggttttccaggaaccataacgttcgggtaaatcccgccagggggcaccggaacagagtatccaaaacatgccgttgataacccggcggtgttcaacataaggatgtcccgcccgttgagaatgttcagggggcaataaggggagcagtaactcccatgcttcatcaggaaggtcgtaacgagccataacatgttttttccgaaagtcagagccacatagattattctatctcagcctattgcgggacacaccctagtgataatgctgatgtataatccttccatgcaaggaggaagtgatgttaaaaatattcaattgcgtaaaatttatcggattgctgattgtttttattttaccttgtatcgggtactcggaaacccaatacgtagatcctatgacaacatgtctaaatgattatgtccttcctaaattatcagcagacatactgcctgaaaagttagtggatgatgcttttattacgtgcaaatctcaggttgatgagtggcttaagccttttgaggctattgataaacgtgaagaaaactataaatctatgcatgatttttatgttcgaatggtaaatatcagacggaaagccgaattaagcaataactgaatgatgattatttgttattgaataaatattgtatgttgaccaccttccacggtggtttttatattttaagggaaagaaatggcaaaaaatactgactgggagggaatagagcgtgattaccgttccggctttctctcaatcagggagattgccaaaaagtacggtattagtgatgccgcaatccgcaagagggcaaagactgaggaatgggttcgcactattgttgacagtacgcagtgcgaacctgatgcgaaccaagcggaaagtcaggtagcaagtaacaccagtaatatcttggagtctgaaaagttcgcagagagttcgcaaggaaccgcagggattctaaagccgcaatacgaacagtttgctcaaaacatagcggcgggtatgccgatgaaagaggcggcaatttgtgcgggttactctccagcccgtgctgattctcaatcatccatattgatacgcagaccggaaataaaagcccgcattcgagaactgagaaacgaagcggcgttgcttgtttcattcaatgctggacacctggctgaattgtcgtttcgtgctgggaaggaagcgttagcagataagaagttcggacaggttgcgccgaacattaagaacgctgcgcaacttaccggtatcgacatgagcagcaataaaactgaggtcaatgttgatctcgctggcctgagttatggcaaagtctgtattgtcactcccgccaattgtcctgctgatgtctgggcttctcacatggagaaattgcgcgagggaaaacaggtagcccagtcatcatagatggtgttctgtacgcctttagtagtgactgggcgacagaggttttatatgaccgagcattgggttctgttcgctggcgttggacatatggcgggcgtggtggcggtaaatcggtagagattgctcgtgcgctggtattgttgggtgctatagaaccaatgacgattctttgtgcccgtgaattccagaactcaatcaatgattctgttcttgccctgcttgaggcacaaatcattgatcttggactgtcccacttctataaggtcaaaaacaacgagattgaaggtcagaacggcactcgtttcacgtttaaaggtcttcgcaacaatattcaaagcatcaagtcgatgcatggcattaagatctgctgggttgaagaggctcagaccgtttcgcaagatagttgggatattcttgggccaactgtacgtgctaataaatccgaagtctgggtttctttcaaccctcgcgaggaagaggacccgacatacaaactgatgacccggcatcaggaagatccctctgacggcggcgttattattcgaaaagttaactattgtgataacgcctttttccctgacgtactccggcaggaaatggaatattgcaaacgcatcgattatgaagcgtatgagcatatttggcttggattaccaaaagcactcagtgaagcggttattttctctggaaaataccgggttgaagcattttctgatgagctatggctagaagccgaccggcttttctatggagctgactttggtttcgctaatgacccatccacactggttcgctgcttcattattggtaccaaactatatatcgaatatgaagcctatggggtaggcgttgaattagatgaaatgccccagttctatgattcggtgccgctttctcgtaaatggcccattcatggggacagtagccgaccggaaactatcagttacttatcacgccaggggttcgttatcgatggtgccacaaaatggcccggaagtgtcgaggacgggatcacttatcttaaaggctttgaagaaatcattattcatgaacgctgtaagcacatgattgatgaggcaagactctattcatacaagactgaccgactgaccggtgaaatcctgccggtggtgctcgacaaacataaccatttatgggatgcggtacgttattcgctggatggttatatcacaggcaaaaacaacccacttcgtatatctaaaaatctgttgggcgaatttaatgtttttcaaattcagacataaaaagaaagcggaggttttgccagttgaacaggatattgatcaagcatcacctcagccaatgaacatacatccggatactgtcggatcgataacagagagaaaagtagctcggcctgttgaaccatacaggccccctcccggtgttgttcctactgaacagttatccgcattaatggcaatggattctacaccttatgaatatatgacgggtacaggtggtatatcgggagatgtgggtttccccggttatccttatctggcccaactgtcacaattacccgaatatcggaaaatggtcggcactattgcaggggagatgactcgtaagtggataaagctaacgtcagtgggggataatgacaaatcagataaaatcaaagcgcttaatgaggctattgaaaaattccacgttcgtgaacggttaaaaaaagccattgaacatgatggtttttttgggcgaggtcagatttacattgatgttcgcacgtcaagaggcgtgcttgctgcaaccgatccggttgaacttgagtctagattatttctgtcacccaaaaaaatcacaaaggggagtcttattggctttaacgtcattgagccaatatggacatatccggggatttataacgctagcaacccgttgagcaatgatttctataagccgtcaagttggtatgtgatggcaaaaactgtacatgacagtcgtttgattacatttatcacccggccattaaccgatatgtttaaacctgcgtataatttcggcggcttatcactgactcagattgcagagtcttatgtacaaaactggtataggacacgtgatagcgtatctgatttgatccattcattctctgtgtctggatttaaaaccaatcttcaatcgacgttgcaaggacagacgaagaatcccgatcagttaatttatcgtgcagaattgtttaacaagatgcgtgataaccgaggggtaatgatgctggataacgaagaggagtttttccagttcaatacaccgctaagtggccttgattcactgcaagcccagtctcaggaacatatgagttcagtcagtagcataccgttagtgatttttacaggtatcacaccaagcgggctaaatgcgtcatctgatggggaaatccgtgttttctatgacttcattgctaccttgcaaatgttagtgaaagatggattggcacgaatgattgatattattcaattatccgaatttggcgaaattgatcctgatattagctttacattcgaaccgctgtatcaaatgaatgatgaacaaaaagccagcatacgtaagaccgatgcagatactgattcagtattaattgctgcaaatgtgattagcacagatgaagctcgcgaacgtctagccaacgatgaaaacagcccgtatcactctctggaaatcaatgatgaaatcgacaaagaagacgacatcgaagaagagggcaacacggaaaacatcatctgatccccttcaaacactccgacaaattaaacctaatgccggtgttcgggtgtggtacagcaagcagttatataagctggtggatgagatgaataactcggtgatttactgggtatccgccaactataagaacagcggtgcagcaatggcaatggatgttagcccggagatgttgatgcgttcagcaatgcgaaaattaacccggcgttggttaaagcagtttgatgctttagctgacaagctggcgaaaaaattcgcggctttatcaatggacaacatggatgcctcgttaaatcatgcgttagatgcggcacatatttcgataccgttcacgatgacgacagaaatgaataacgcgctacagacggtcattggtgagaatgttgggttgattaaaagtattccacggcaatatttatcccaagttgaaacgctagtgatgcaatcagtagcaagggggcgtgatcttggaacgttgacaaaagccttgcaagagcgttacgacattactaagcgccgagcagtcctgattgctcgtgaccagaacaacaaagcgacttttgttatgcaatctgcccggcagcgttcaatgggttttaaaacgggtatctggcggcacagtcatgcagcaaaaaaatttcgtcaatcacacttgaaagcggatggtaaagagttcgatttatcaaaagggctttatattgacggaaaatggatcatgcctggtgaagaaatcaattgcgggtgtggttggcaggtcgtcattcctaaactaaccaattaattaatccgagaaatattatgaatcacggtctggcgttagatcgggcttctgtacgctcatacgacagagatgggcgtttgcatgttactgaaagtcctatctctaaggcgacggtatcatcgtattacggaagagaaatcccgaactggcaagggttaaggcttgatcctaatcgtatctacaaactgttgcgtgcccctgatgaattagagaaaggggttgcaactttcaataacctgccgttattgaaaaaacacattcccgtcacggcggccaaaccttcaacagaattgattgtcggtacaacgggatcagattccatgttcgatggtacatacctgaaaaacagcctggcaatttgggatgctgaatccatagcgggtattgaatcggatgaacaaaaagaattgtcagcggcgtatcactacgtcgctgatatgacccccggcatgtatgacggcattcatcatgatggcgttatgcgcgatatcgtcgggaaccatgtcgctcttgttgaagaagggcgagtcggtgcagatgttgttgtctgcgattccctccctctggagttaaaacacatgaagttaaataaaaaaatggtggctgtcgctgtacgtgcggcgctgggggcatacttgcagccgaaattagcacaagatgctgcaccaaaagaaattgcctcattactgaaagcgggtggtagcgcgaaaagtatagcggaagcggcgaaaaacaaattcggtacccttctggctcaggatatggaaatcgactcagcggagcttgcctcaatcattgaagctgttgctgatgatgcggagacacaggagcctgcggagttacccgcgcaggacgatgatatctgtgcacaagtacttgaactgcttgcgggtaaattgccagaggaagacttggcaaaaatccgggcgttaatttcaggcactcccgcgcaagacgatgatcccgataataaaccagaaccaaaggaagaggatagcgtcagtaagcccgcaatggatgctgctattcgtgcagctactcgaaaggcagaaaaagacacagtgaatcgcattaatgctattcgcattgctgaggctgaggttaaacccctcatcggtgatgtagtagcaatggattctgctgacgaaatttacaaggttgcgcttgatgaggtgggtgttgatacaaccggcgttcatccgtccgcttatcgctctttagtgaaaatgcagatcggcatagcagagtcagcaaaacttaaagcccacctagcaatggattctgctgctatagattcttttgaaaaacgttttcccaccgcatctaaattagtgaggatttaactatgggttttccgaacaaaattaatcactatccagcccccggcattgagggagcatttgccagtactaaccctagcgccactttgttagcaagggacggcacgctgattgcgggtaacgatggagtaactgttgggcgttttgcctgggtgattgatggtgttgtttcgaacaagggggcgggtgcaccgtctggttttgtggggcgtgacggacaagcgtctatcactctttggttgggagaagcatccatgctgatccaacccggacgtgaagtcactttatttactgcgggtgattttacggtacgaacaagcactcccgcaaaagttggggataagatttacgcatccttaaaaacgggtgaggtgcaggccgccgcagcgggaaaaactatcactgattttatcgaaactaaattcgttgccggtactgctgctggtgagagtgaattagtcaaaatggggacctggagctaatgaaacgacacacagattttcaatatattgaaggggaatacggcattgtagtaccacaggccgtcgattacttaaatccccaatatgctcgtaactatacgttagctatggatgcacagccagctatggtgactgtgagtaatgccggtgttcctgcgtatctgactaactatctcgatcctgagctggttcgtgtgttggtcacgccgatgagagcggctgaaattatcggtgaaaataaaaaaggtgactggacaacgctgacaacccagttcccggttgaagaatcaacgggtgaagtgagctcatacggtgatcacagcaataacggcatgtcagatgctaacgtgaattgggtggaacgccagagctatcatttccaaacatttactgtctggggggagcgtgagctggatatgtacggtacggcccgtatcaatcgagcagcgcaacttaacaccgcaagcgcattaaccctaaacaagtttatgaacaagtcttatttctatggtattgcggggcttaaaaactatggactgttgaatgatccggggttaagcgcaccggtggtaccggctgcaaacggaaaatccaatggtacaacgtgggaaaccaaagacgggcaggcaatttatgacgatatttcccaacgcctatttaagcagcttacaaaacaaacagaagggttggtggaacgaacagagccattgaaactttgcatgtcgccaacagcggaagttaatctgacaaaaactaaccagtacaacgttaatgttaccgatcaattgaaaaagaattttccgaatctgacgattgaaacggcggttgaatacagtacggaagcgggggaactggttcaattgattgctgatacgcttgatggtgaaaaaacggcttatgcctcatttactgaaaaaatgcgggcacacgcggttgttgtgagctcatccagttttaaacaaaagaaatcagccggtacgtggggtgcgattattcgttatccacacgctattgcacaaatgttgggggtttaaatggtgacagtcattgtggggtgtaaattgcctcacgggttaacgattgaaattgatgggaatcgcgtgacgctaaacgggataaattcatcaacaattattggtggttatgggctgacatatgatgttgataaagcgttttttgacaaatatctggaactctatgcagatacggaattagtcaaaaatgggcttatttttgcccaagaaaaactcaaagaggctcggacggaagctgaggaaaaagccgggttaaagaacgggttagagcctatcgatccccaaaaaccgggtaaaaatatcgagcagcgaaaagaagaggattaagctaatgggctttgttgtcgtttttgatgtcgtgaaatttcgcactcgttacccggagttttcttctatcagtgatgtcctgctggatacctattttattgaagcaacactctatcttaacaatacggcccaaagcccagttagtgatcttgaacaacgaatactgttgttgaatatgcttgttgctcatattgccgaacttaatcgtttatctgttagcggaacagcggccaatccgctcgtggggcgggttagcagcgcaagtgagggatctgtttccgtttcggctgatatgggcgttgtgagtgaacgtgctgcttggttcttgcagacaaaatacggggctatgtactggcaggcaacagcgcaatatagaattatgcgttacgtccccggcagctctccctctcactatccgtcatattactatccacggactcaatggaggcgctaatgtcgaacagtatcaagggcggtgatgcagcaaaacgctacttaaagcaattagctaaaagagtgggtgaaggccaaaaattgcgggttggttttttcaaagacgcgacttatcccgatggcacctcagttgcaatggtggcaattagtaacgagattggcgatccgaggcgtaataggcgaccccgtccgttttttcgtaacactatcaacgaacatgctaatgaatggggtgatgtgcttgcacagggcctgagtgctaacgatatgaatggggatgcagcgttacggatgaccggggaagttatcaaggggcaaattcaacaatctattcgttctttcacttcaccggctaataaaaaatccactatagctaaaaagggatttgatgcgccgctacgtcacaccaaacacatgctgaacagtgttgattatgtgattgatgaggggaacgaatgaacctgcacaatattgtatctggtgctgttggggttgttaatcctcactcacctggagagatacgggtaagtgtgggatatgatattgcacccagtggtaagcaagtcccgcgctacattacaacacccgttaccgcacaaatccagccactgacttttactgatctacaacatacgaacggcttgaatattcagggcatgctcaaagcggcttatgtgaatggcaattttaatgccgtcaaccgccccagacagcaagggggtgatctgttgattattaatggtgaagagtggttgatagtgcagattttggaagagtggccgaattggtgcaaattcgctgttacattgcagcgtggggaacaatagtggtgacgataagtgtaacgcaagacgatataacaaccgcattacgcggttttttaatggccttaatacccaggcgtagcgttattttgtctcagataaatcgctcaccgatgtcagatggcgattttattgttatgacaccattgaacagcacgggtttatcaacaagtgtagtgatctataacgcaccaacagcggcaggtatgggaaaaagtctaatcactcggacgacacgctggacatgtcaaattgactgttacggtcagttcgctcatgaggatgctcacattattgcaacgacggtgcgcactgaatatgcgattgagctattcaagagatcaggtatcgatatggcaccactttatgccagcgacccgattcagacgacgatgattaatggtgaacagcaatatgagtcgcgttggacatttgaatttactgctcaaatcaaccctgttgtgacaacagaacaactattttttgacagtattacgctgaacactaaaacagtggagtctattcatggcaattccaatcagtaaagacgtgagaattaatccgggggtgctgtcggcagtgggtaatgctgttgatctcaatggattattactgacagataatatatatgcacctgttggtgtggtgttgtcgttctcgactaaagaggatgtggcggcatatttcggtggtgcatccgaagaatatagcatggcggctatttatttttcagggtacaacaattgtacaaagacgcccggtcaattgctgttttcccgatttaatcgagcggcagtatcggcctggttacgttcaggttcttttaatgaggtagctattaccgatctgcaaaaaatgtccggtacattgaaactcaatatcaatggtacagcaataaacgccgcaatcaatcttgatggggttaaatcctttgcggatgcagcaaagagcattgaaacagtgattggcaaggcggtaacggttgtgttcgataccacccgtaaagcttttatcatcaatgttgcctctggcagcattaaaccggaagatacaaatatcacctatggtactggtgatggggccgaggctcttaagttcactggcgcactaggggcaacggtttctcagggggctacagtgtcggcggttcctgatctattcgctgtgattaaaacgcagtctcagcaatgggcatgttttacgacggtatttgaatgtacagatgaacagcatcttgcattatccgcgtgggctagtagtcaggtatatcgctatttctatgttgcctggacaacaagcggcacggcaaaagtgaaaggcagtcaggaaactatcgcccataaaattattggcattcacagctacgggagtgtcgttcctgttttctgctctgataatatgaaaccggcagcagtattgggttatgcggcggtgctggattttgagcgaactgaggggcgtgttccgtttaaattcagagaattgagcggcctcagtcctgatgtgatcgattctgatgtttatgatgcgctgattgctaatgggtataacttctatggcaattatgccgccaataatatcaccgaaaattattgggctgatggcacaataaccggtgattttaagtggctagattccttctgtggtcaaatctggctgaatgcgaacttgcaaggcgcggttattgccttgttcaaatccaacaagactatcccttataacacggctggccgtgcgctggtggaagcctcaatgagtgatgttatccagcggtttaagttgtggggcggtatccgagcaggcgtaacattatcggctgcacaaaaactggaaattattaacgctgtgggatctgatgtttcaacgtcaataatcgcgaagggttattacttgtatattggggaaatgtctgcctctatgcgtgcaaatcgcaccagcccaagctgtacactgtggtattgcgacggtggcagtattcagaaattcgaaatggcatctacggaggttcaataatgtcagacacaatcacttctgctgatgcggtaattaccctgactgtgaccaatttatacccgtctggtgtgcaattacagggatttgctgccgacaacattttcgaaactgaggcgttggatttggctgaaacggtacgtggggcggacggtaaactgtcagcgggttttatctacggcaatatcaatcagacgattcatattatgcctgattcggaaagtcgcaccatttttgatacctgggcaacgacatcacgtactagcgtctcggtgttcagatgtaatgcgacggttattcttccagccatcgggcgtaaatacacattggtgaacggcgttctgaagcaatggaaaaccatgccggacgcaggaaaggttttacaagcggcgcaggccgtcattgagtgggaatcaataacaggtgaggcatatagctaatggcacgtaaagaaaccttcatcactatgaatgatgataatcgcgacaaaggaaagcttttttacattcaggaaatgcccgcttcgcaggctgaatggtgggctattcgtgcattgatggcaatggggagagaggggttgtctatccccgataattttcgggatttgggcatggctgcattagcggtggttggattgaaagcaatttctcgcattgctcctgatgaagccaggccactacttgatgaactgatgggttgtgtgcagatggttccgaatcaggtagataaaaaaatcaaacgcgagctgatcgacagtgacattgaagaaattgttacccggctgaaattacgtgcagaggtgcttaagttacacgtggattttttcaaaaccgccgaccaatcgtaatcccgccgcgctattccagcatctcaaagccattcggtatcatcagttatacaaatgtcccaggcacaatagcgaccgttatctcatcaggaaaggcaacgctccatgagctggatacagtttatggcgtggaggacctttggcagttaatagagattattcaggtcgataatcacaatgcttacgttttacagcagggtaaaaactgatggcaaacattatagatgaacttgttataacgctggggcttgatgcggctgaatttagcgcaggtgaaaccgcagtgattgccgggatcggtgggttggctcaggttatgcaaaaactgattgactcgtttaatgatggtgaaaagaaaaccagcaaatcattagacaaaaccggtaagaaaaccgaaaaagtggcaaaagaaatggaggcggcaggaaagaaagcttcctctttcttttccagcataaagagtcagatcttggctttggcgggtgtcacggtctcactcggtggactgaaaagttttgtgaccagttttgccggcaatctcaatcagttaagtactgccgctgatgcgttcggcatgtcggctaaagcgcttgatggctggacaaaagcaggtcaagcatttggtgtcagcgcaaatgagattgtgggggcattttcacgcattaatgatgctaaagcccgactaaaatcaggtgttgcgcttgatccggctcttgagacgctgttaaaaacggcatcacaagcgggtgtcgatattgatattgcctcagaaagcaccgaatctatcatgcgtaagctgagcggtgtttttcccagacttaataaagatcaacagcaagcttacggtggtgaacttggggtcgggtacgccgcgcaacagtggttctcatccggtcacgtactcaaagatgtggataaatttacagctaattcgggtgtggatgataaatctgttgccgccgcgcgtcgttttcgtgaacagtggacagagataagccagagttttgagaaaacaggctacattctgtttaatgcccttttaccatatatcaatgatttcaatatctggctaaaaaacctagctgattggatgaataagcacccagaagagattaaaaaagcggtcagtggttttctcgataagatgagttttattatttcagtcgctaatcaggccgcagatgcggtaggcggttggggtaatgtcatcattggtctgatcgggttgaagtttgcggggtggttatggggaatttatcgcgtggcttcgtccatgctgaaaatggggaaaggcggcgggttaccgggaaaagggattgccgggaaagccggaatatatggcgctatcacatatgcgttatatgatcctgtggagtcagttgcgacttcgattgttggggaagagacaaaaaatacacttgattcatatggattgtatctggcaagcgactggacacccttttttagtaaaaaagagtatgaagcctatcaggcaaaactggatggtaaaacctctaagccagatacgaccgtagtcaaagaggtcaaaaaggaagaaaagcgcagcgaaaatgaccgtatcattcgggccgaggatgaacgacaacagcggctagaatacagcaataattggttaaaagccgcgttagataagctgaccgattcaattaataaactgattgattcgctcgttcctcaagtcgcagccgctgaaatgtcaccgaacactaccggcatgaaattactgggttggctatcaccaaaattagcacaacttgagcagcagttcgggttaccggagggtttgttacgtagtgttgccatgacggaatcgggaggcaatcagtatgctgtgtctaaagcaggtgccaagggcttattccagtttatgccaggtacagccaaacattttgggttaatggatgatgatgtttttgatccggtaaaatcttcggaagccgcggcaaaatatttatctcagctaatgagaatgtttgacggagatttgagtaaagcactggcggcttataactggggacagggaaatgttatacggaaaggattgggcgctgcgccaaaagaaacccgcgattatatcccaaaggtattggcgaatatgccacaactgggggctcatgtggccgctcagcgttattcgaatacggtaaataacaaccgtacctcctctgtttctgagagttatcacatcggaactattcaaatcagctctaacgctaacaacgtaaaaggcgtggttaacgatgcccggcagaaaataggtggatcaacgctggcaacaagctattcaacgggggtaactggataatggcattctctctcaatcaaacaacggtacttagtgcgttccgtagtggcaacctgctatctggtgttaacagtatgatatctcctggatatggtatttattatgcatccgggcagagagttggtgataagccgtttacgcccacatcattcattgtagtagaagtcacacgagaggcatcaatcacgactgcgccgatagagaaaggcggctatacatcatacaacaaagtgcagcggcccggtgaagtccatgtgacattctcgtttgagggatggaccggtttttctggttccgtgcctaacttaacaaacctcaccctgacgtcccgttctgatgttcttgaagcgttagataagatggtatccagtgctgaaatttacgacattgaaacacctgatactacgtacacaagttatgatttgattaagtacgattttcgaataaggcaggataacggtgttaccttactgattgtgaccgcagttttccaggcggtacaagacattgccgaagtgaaaatgagcagcaatgttgctaacaagtcgaatacaacaaagaatgagacagcaaaaggcccaagtaaaaataccgaacaatcaacaggttcaacaaaacatgccacactatccgatgtcaaaaaggctctgaccggattgaaaaaatccgtttccagtgctgcaacgcaagttgctgataaagtttcatctggtttcaagcgtgcaacagagacgattactggtccattaaatgattctgtattgagtgccaccaaccatctcaatgatgcagtagaagaattatcgaggaaattaacgtgattgaaatagcgatcagggcggctaaggctcaggagttcactgtgaccttgaatgagcagtcatgcatgatacgcctcaatcaacgtggcacaggtttatatatggatttaaccgtcaatgataaacctgtgctacagggagttgtgtgcctcaactgcaataaaattgtccgttacagttatttacggttccagggtgaattgttttttgctgatctggatggtttatctgatccccattgggaggagctagggcaacgctacaaattatattacctttttccaggagaggtgactcagtgacgtacaaacaacacaatatcacagttgaatttcagctagttgacggcaagacatttgatgatagcggtaacaatatactgactatcgaaaacgcacgcgcttatgtcaacatggcggcgtggggcggcatatcagggacacaaataacattacaaatctggggtttaacaaccagccaaatggcaacgttgagttatcgcgggatctggattggtagtgcgaaattcaacttaatgcgtgtatgggcggatggtcatgctatatttgagggttttatcagtgatgcctatgcagattttaatcagttacccgatactcccctgacgataacggccagtatgatgcttggcctaagagcaaaggaagttgaaccgttcactgcatcgggagatgtggatattgtcgatattattactgcaatggctaaaaaagcggatctaacggttgaaaattatggcgccacaggtgttatctcaaatcctcattatacaggaaacgttgttaatcaaatccaacaggcggcaagtgcgctagatatagacactgactttgggattgataaagtgaccatttggcctcatggtcaaccgaaagttgaaaaaccgctacttacgtctccagaatatgggctaattggctatcccatatttactggcgtgggaataacagcaactacccttttcagtaatgaaattattttaggtcgtaaggtaaaaatagaaacctctttgccgaacgttagcggcacttatctgataacaggggcggaacactaccttacctcctggcttgatggtggtcagtggcatacatcttttagtggcactccagtgaaaacagaggataaaaacaatgacaaagctgacaacaaaaccaacggacataaacagtgaagcgaatgcttttgattttgtcatgaggcagtttcttagtcagcatgtttttatcactttgggccttgttattaaatcgagcgggaaaaccgtagatgtaaagccgatggtacataatatgacgggagcagggagaaaaatcgagaatggaataatctataatgttccagtatttcgtcttcagcgtggtaacagtgctgtcattatgaatcctgtggttggtgatattggtttaattgccatttgtgatcgtgatattagcagcatcagagcaacaaaagcaccggcattaccgggttcaaaaagaacgcacaattattcagacgcaatttatctggggggagttttaaacgcagaaccacaacaatatgttgaattcgtagataatcagataaatattgtttcaccgaataaaattaacgtagtcgctccgacaacggaaatgacttcatcaaattcaatcacaatgaactcaccatctattatattaaatggtgcggttattcaaggtggtggcggtaacggtggaaatgcaatattcgatggaaccgtaagatagttaaagctgtaaataaggatgataaatatgtagaaatgaagaaactaagaaatctttgtgaagcccaggtaaattttttatttttctcggtcattgttttaactggtaacagtattagttgaactgtgaaactggaaaaggttacgagtatgtgcgacttggaaaagagcttcttttgactgatatagagatagaagcaatggttctgtactataaagtcaatcacattgaagtcaacattatttattttagctgaagtttagagaataaaatatagagaacggtaagttataaaccttagtcacgctggtggatatagccatccttggtttggggttaattgttaactcacttgtcattgttaaatagtgcacgttttaatggcaagaaaagttaaatagcatatgaaataatcacaaaaagctgtaagatatatcaaccaattaaaaatgagagataaagaatgtttaatcttgagcagatcgggcatgtggtaagaaatagcatgcagattattgttgatgagcttaagcttaaccttgctataggggatatctctgatgatgattacagaatcctttctcgcggatacggcgaactaaactgggatgaatgtttgtctagggtaggaaacagagaagataaatttgaattttgcttaaagctggtagaatgtggaaatgtgcaaggacctccttctgggctagctttatgtacatattccattgatgaggaaagttttgaaattcatatgatagagaacttctatcgtgatgacgcaaaacaccctttaaatgggaaaatgtttcaacttactctgatggctgcttacatgttttgtaaatctgcacagggtaaatatatccgtatcattgagcctgttgaagaagtaatctcctattactcatcttatggatttaacatgatgaagtgtggttacattatggaggctgatattgatacgtttgaaacaatattcaagacaatcaaagattgataaaaaaaagactagacactagagtttatagtgatagcatacgaaaactaacgaatattagtttgttttttgtgcaagagaaaactttgttaatgtgaacaccccttatgggctcaggctcaaagctattggagagaaaatctcttaggagtcgttatgtcaaagcagaaagcagccattaaagatatcaaaaaatttgatacgcagcaggtgtatactgctgtgggtggagctattgacttgttgataaaagctgccccaaaaatgtttgagcataagccaaaagttgagcttcaaggaaagcgtaagaatcatcgtcaagctgcttaaaattttttgagtagtcgtcaataaacccgcctacagtgcgggttttttcatatctacaccgcttaattgcggtttttttatttccataggaatcgaaaatgcaaactcgttcatttcttcttgataccgagtcatgggatttaacgttagatgattctggaaatatcgccattactgataatccctattctgtagcgcaggatgtcgcttgtgcctgtagtacatatctgggtgagtgctggtatgacacagcattgggtattccttattaccagcgaattttgggatattggccgggaactcagctaatcaacagcaaaatgcaacaagaagcaatgaagtcaccttatgttcagtctgccacttgtaaagttataaatggaaaggagagaactattgcgggcatgatgacaataacggacatgaacaatcaatcaacggtggtaaatttctgatgactaactctgtagtactgacaacaagtgttccaggtgtaacctttacaaagacgggtctaactgtgcccgacgaggttgatattttaaatgggcggctaaatgatttggctacagcaatgggtggtgcaatgagtacgagcttaacaacaccgcaaggtcaaatagccatgagtgatgcggctatcattgctgacaagaacgatcagttacttgctatcgtcaatcaaattaatccggattatgcaaccggacgttttcaagatgctatcggacgaatttattttttagatcgaattccagcatcgggaacaacggtaacagcaacatgcactgggttagttaatacagttattccaattggtagtattgctcaagataaaaaagggtatctttatcattcactaacagaggttaagatcccgggcagcggctctgttgatgttgttttccaaaactcaacatcagggccgttagcatgccaaattgatgacttgaacacgatttatagctcggtgcccggttggtcaggtatcagtaatgcgagtgctggcgtacctggcatagatgaggaaacccgcgctaattttgagtatcgtcgtaaacaatctgttgctaaaaatgcgacaaactcattacatgccatttatgccgcagtattagaagtaaatggcgtggcagacgcatacgttatttcaaatgatacatcggtagtaaaaacggtcggggtatcaaaatacagaatggtgccaaactctatttatagtgctgtatatgggggaaagactgaggatgtcgctagagtaatctggaagaaaaagcctccaggtattcctacgaacggaaatacaactcacacaattgtggatgatgaaaactatgttcagccttatcccgaatatgaaattaactatgtgataccagcacccattcgtgtctatgttgacgtctcacttgctaatagcgattaccttcctgctgatattgaaacacaggttaagtcagctatagcgcaagcatttaacggagaagacggtggaacccgagcaagaatagcatctacattatttgctggtagatattattcaggcgtttataacatagatacatcgagtgttgatatttacaatattacgcttagccgtgacggtattacttattcaacatcaattagttttggtattgatgaaatcccaacgcttgacgttgataatatttctgtgaaattagtaggttcataaatggaaaatgtgggagcaactattcttgctcagtatgccgctagtccaaaactcaactcacttattcgaagtttcaatgccgctgtttcctctgttgaatttattaatacattttacgatctgatttggaatattgacacagaaaatacttacgggctggatgtgtggggaaaaatagtgaatgtcagcaggcggctgactgttaatgaaaatgtaaaatatataggttttggtgaagctttactgaatgttccgacaacgatagatccaaatccatttgaccaagcaccattttattccggggagtcaaaaacaaaaactattgagctatcagatctgatgtaccgaaagctaattatgatgaaagccatgtcaaatatatctgactgcactataccaaacatcaacagaatgcttgtttatatgtttagcgatagcggacgtgcatatatcactgatgatggaaatatgaagatgagttatgtatttgaatttcagctatcaacagcagaattagcaattgttcaaacatcgagagcactgccttacccggttggtgtcagtgtcgcaatcgttcaaaggataccaacaaatgaaatcaactgaaaaacctaatcttattgctgttccgtttgcgagcgccggagactataacgagattgcaacaaaatcaactgaaagcagcttggcaaaaggagtagctacgtatccgagcggtttccccccgttaacgatgacagcaatatctgctggtggaattcctccatctggcaaggatatgaacgggatattgaatgatattactaccgcaatacgttattcaatgtctggtggcttgtattcgtataatgctgactttagtgctgccattgatggttatcctaaaggggccattgttgccagttctgatggaagtaaaatttggtggaatgaggtagaagataacaatacagatccggatagtacatcagtttccggttggaaaaatctactagcagatcctaatgggttatttctacagaaagctaataacttatctgatattaataacaaagcgacagcacgtaataatttaggactgggagagattgcaactcaagatttgattcctgacgccacacttatagaaaaaggcatcacccaacttacagacaagacaggtaacagtaatacccttgcagcaactcagaaacttgtttctgatgtgaatgataatgccaataataagctcgctaaaaatcaaaatggagcagacatcttcaataaaactgaatttgtaaaaaatatcggtttatcggaaatggtggagttggctaaaggggcggtgccgaatagccggaaaattaacgggaagccgttggccggggatattagtttgaatgctggggatgtgggaagttatgctaaatctgagagcgataatactttcttacgcatttctagcaataaaaccgcaaccgttggcagtttactgattgacagtaaaactccttttcctaaattgcgtttcaaatcgaaagatggatatatattgggaattaacggttctgaagggaaattgttgcatatctattctgacgatcccaagaatcagcggcgttacaatatattagcgcctgagagaagtggtactcttgcattacaaaatacagctataaaatccgaaaatggttggtggcaatgtggagatacgggggtaattattcaatgggttaaagtcccatcagctcaacaatcatggataaaggtaaattatccaatttcttttaaaaataagctttttggctatattgcaagtatgtcgagtatcaatacatcaactggccacacattagtacgtaatgcaacactatcgacatttgaatatcaagcaggtactcccaacaatgatgagaatccaggcaaagttgtacatatattattttggggggtataaatggtctatttctccagaaaagaatgtgttttttataatgaagctcatgaagagtgtgttgaaataacagcagaaaaacacaatgaattacttgacggtcaatcacgcgggtttgctatcgtcagtgataaagagggttatccaattcttacagaacaagcacagtctgtttatcacaagtgggatagtgaaaagtggataatatcagaaagtgataaaataaagctcagacgggaacagcagcagcaagcagaacataagaaacagcaacttatgctcactgtaagtaaacagatcgctccgttacaagatgctgtagatttggagatgtcgagtgataaggaaaaatcgctgttagcagagttaaaaaaatatagagtattattgaaccgcgttgatgttaatttagcgtcagatattaactggcccgaaaaacccttagaataatggaatcagggccaattgaaccgacctccaatagttagataagtctaatcaaatatggcttttttgcactactctgactgaatcgtcctcaaaatgttggataatcatccaacatttaaggatatagtccatttatgctttagtctattaggtaatcatcaacccaccaggataatacttaatccagtcaatagcagcactggggttaaatggctcaatactcagtccttccaggcattgccagagttcctgagtgttctgggcggtaataacaatacagtccggcatcacccggatttttagtggcattccaaaggtaaatcccgcttcctgtaaccattttccttttaaagaaatgccgtttttagctaccttgccaaaacgttcagcttgggaaattcggcgaattgttttattatcgcgtttagccataattaactaccttatatagttagttgtggtaagcagggttatcgggtggcagcccggtagctctgcgtcagtgaaaatagtctctcaatgttgaattatgaacgataggttacctttctgcaataaaaatatgacctatagtttacctgggcttttcgttgtcaggcagtccattgagggcgtcattccagtgttgatcccgttctatattattcactattttgctgatccatgtttctgatttgccccaccgtatagccagctcgcggcgcgtccagccttttcgtttcatttcagacttaaacaattctggcggtatacgtttcaaaattactccacaaatataaactgtttatcgacacatcatagtatagccatttcgccgatagggtgacattggtaaataaaatgaccgcttaagtggcacaagccgaactccatgagcataggatatgccacaccagaaatacctatcactaaggtgattgttacatgaagttgggttacatgcatgcgtcaaaaactgacggtatcaagtgctggatttatgaataatgccctatgaggcagagatctggtgaggcattttattttgtactataaattataaaatagaggtagttgctatgtgttacagacataaaaaaaccaacctaattatggttggtttttccaaaagctccgcggctcctttgcgtatccttttgtgtcccttcattgtccggtcagtgtccaatcaactttgctaactcactgtttttaaagctgttgtcctatcactgtccctactaaattggtggagctggcgggagttgaacccgcgtccgaaattcctacatccttggtactacatgcttagtctaatctttacattcgcttgccagctgcggacagacacgccactcacaaactagcctgattagatttaacgcttcaaccccaggcaaggcatccacgcgatctcttttgggtttgacctctcttgatccccgtcctaagagcggaggctagggagagagggctctgcgcaggttattaagctgctagtgcgtatttttcgtcgtttgcgactatttttttgcggctttttacgaggccaaccgcccctcggcatgcaccttgggtttcgcgaatcccgtcgaatccagaatcagccccaagtgtcttaaacgcaagtatatcagaatactaaactataatgccagaatttatcgcccagcattcttcataatacgtgctttgtctaatttccattcacgttctttgatgtccgaacgtttgtcgtgtgcctttttgccttttgctacgccaattctgactttgcaccaagcgtttttccaatagagagataaggcaacaacggtataaccttcacgattgactcgaccatataatgagtcaagttcgcgctgattaagtaagagtttgcgtgaacgcattggatcacagacgacatgggaagaagctacatttaacggggtgatggtggcaccaaaaagataagcgtctccatctttgagcaaaacgtaactgtcgctgatgttggctttaccagcgcgcagtgatttgacttcccatccttgtaacgagagacccgcttcaaattcttcttcaatgaagtattcgtgacgagctcgtctattcatggcaatggttgccgaaccgggtttgtgtgcttttttctttgtcatagtgtatgcattatactgaatgctttggtgaaagaaatcttttcccgcgcatatttgctgattaatgcgtgtttattgcattatacgctgacagttttttctttgatcacgtataggtgatattatttgctacaattaagccttacaggaaattatatgccacagattagtcgctctgcgttagtaccttacagcgtggaacaaatgtacaaattggtcaatgatgtcggttcttatccggattttttaccggggtgtgttggtagtcgtgtgttgagtgttagcaataacgaaatgactgcgtcagtcgatgtttcgaaagcgggtataagcaagacctttgttacccggaatattctgaccgataaccaaagcattaatatgcaactggtcgatgggccttttcgtaagttaatgggaggctggcagttcataccattgagtgaagatgcctgtaaagttgagttgcaccttgattttgaattcactaataagctgattgaattggcttttggtaagatttttaaggagctggctggaagtatggtgcaggcttttactctacgtgcacgcgaggtttatcgtgtctgatatcaatgttgaagttgtttatgcattgcctgatcgtcaatatctgcgtacggtgaaattggctcaaggctcaacagttgagcaggcaatagttgcatcaggtttgctgactttgcgtaatgatattgatttgcaaaagaataaactcggagtttatagccgtcctgttaagttgacggatattttggaagagggtgatagggtggaaatttaccgcccattattggctgatccaaaagaaatgcgtcgtaagcgtgctgagcgggctaaaaataatgctcaataattactatagatagtcagtcatctatttttttgactgactgtctatatttcttcggttattgaagatcttcggtaagtgaattttcgtttttaatgtcagtcagtacaccattactgtcaaatgtcagggtcagagtttgctgagtcactttttcgtgcccaggttgctgacgaaatacataaaaccacgtttgagtcccaaacgggtcttgtaacattggtgttcctaatgtgtaagctacctgttgctgggtcattcctttgtggatttttgatacactcgtcggtgttaggtagttcccctgattaatgtcagggcgataaacagcccgttccaacgtagagcaacccgcagtcagcatgacaaatgatacagcagcggcagtcaacattttacagcgcatggtaattacattcctttaggagtcagggtgttgataataatagaccttgatgagattgaaaacctttatacccgttatctttcaagttgcttctttgttggctgcactcgctcactccggtcacatagttaactatgtgaccggggattcactcccttgccgttgcgatgcatcttgaaatccataaggtatacaagctttagttatgaccctaaatatacgtaaaagttgtatcaaattacgctgctagtagctctttagcgtttgccagggtattttttgtcacttcactgcccgcgagaagccgcgccagctcttgtaatctggcttttttatccagtagttgcatttgagtttcagtttcttcaccgtcagtctgtttactgacataaaaatgttggtgaccacaaccggctacttgaggcaggtgggtgacgcacataacctgtgtagattcgcctaattcacgtaacagacggccgacaattgcggctgttgggccgctgataccgacatccacttcatcgaaaatcaaagcggacgtttccattttcttagccgttataacctgaattgccagcgcaatacgggaaagttcaccacctgaagcaacttttgcgagagattggtgtggctgaccggggttagtggtgacgttaaattcaactttatctgaaccatcagcgttcagatgttcaggtgtaaaagagacatcaatggtaaagcgaccatgaggcatggcgagttgatgcatactgtgcgtaatgagttcactgagttctttagcatattgttggcgaaccagatgcaatctttctgcaacttccaatgcctgcttatggtgtttattaacctgctcgctaaggtgggtacagtcatcttcttgctgcgccagtaattgctgttcttccaataattgttgatgtagtgaaggaagttcttccggtggaacgtggtgtttgcgggccactctaatttgttgtgaaattttttgttccagctcaaaaagacgatttgggtccatatccagttgatcaccatagtggcggagttcatcgctgacttcattaatttgaatggatgcttcttccaacatagtgagtaattgactgaatttatcatccatagtgatgagttctgccagttcgtgtttggcgtaattcagcagactgataatattttgttcatcgttgtcactaagtaactggagtgcggtttggctaacagagagtagctgaccacggtttgctagccgtttatattcattatcttgttctggatattcacctggttgcggtgccagttcattgagctcttttaagtgatactccagtaactgttgacgagattgacgttcaagcgcctgttgttggaatcgagccagatcctgacaactttggtgccattgctgatatgcctgtttcatttcattttgcaaattgaattgattagcgtaagtatcaagcaggcgtttttggtggccgttatttaatagtaattgatgggcgtgctgaccgtgaatttgaataaggtgggtacccaattcgcgtaattgggaaatcggtacggcggtgccattgataaagcctctggaacggccatctgacgttattgtacggcgaagtaagcattcattactgtcatcaagttggtgggcttctagccattgacgagcagaaggcgtatcagaaagagaaaaccgggcacaaatatcagcacgagaagccccacgacgcaccatattggcctcaccacgattacccagacataaacctaatgcatcaattgcgatggatttacccgcgccggtttcacctgtgatggctgtcatgcctggctggaagtcaatttcaagctcacgaacaatggcaaaattgctaatggttaactgggtgagcatcacacttctcctgtgtataaaaacacctctgtatcttcatacagtataaactggttttttatacagtaaagtagtgaaacctaattttttagaacatttttttagaccagcttagttttgtacttaatgtgttgaagtaattatagtcttgaggatgaatgagattaagcttctgtttgctgcggctaataattacatcctctccatcctgtataggtagaactatctggctatcgcaactgacttcataatcgttgctattttgggaaaatttcagcctgatgctgctttcactactgataaccagtgggcgggaagacaatgtatgtgggaacattggtaccaagacaattgcatccagatttggtgttagaattggccctcctgcggaaagcgagtaagctgtggaaccggttggcgttgcgataattagcccgtcagaacgttgggaaaaggcaaaacgttcatcgatatagacttcgaattcaatcatatgtgccactttccccggatggagtacgacttcgttgatagcggtactgatacgaggtttctggccgtttcttctgacttgagcttctagtaggaaacggtgttcgttccgatattcgccatccaatacttcagaaagttgttgcaaagcattatcaggatctaagtcggtcagaaaacctagattgcctctgttaataccaatgactttaatgtcataacgggaaaggacccgggcagcgcccaacatattgccgtcgccaccaacaacgacagctaaatcagcttgtttaccaatttcggtcagaccgccagtttgtgcatcttttaaaccaatgtctttggctacttgacgatcaataatgacagagtaacctttggattttaaccaatgataaagcatttcatgagtagcaagtgcttctgggtggcggggatgaccaacaatacctatgcatttgaattttttattcatcgttataatttccttctagcaagaggttttatcctcacaatatggtgggttcccttgaatccccagtttagatccccataataggctaagtagcgagattaatgccaaatacgcggagatattcatgagtagtaaagaacaaaaaatgcctgacgagcaagtctcggaagatatggaagttgtatctgaacagcaaaacagtgcggataaagcagaagcatcagagactgaaagtgttgttgatccgcgtgtcgcagagctggaagaacagctcaagcaggcgcaacagcgtgaacgtgatgccattttgcgtgctaaggctgaagttgaaaatatccgtcgtcgtactgagcaagatgtggaaaaagcccataagtttgcgttagaaagatttgccaatgaactgttaccagtgattgataatcttgagcgagctttggaggtggcagatcgtactaataccgaaatagcacctatggttgaaggcatcgagctgacgttgaagtctttccttggggctgtgggtaaatttggtattgaagttgttggcgacacaaatgttccttttaatcctgaaattcatcaggccatgaccatgatggaatccgatcagcatgagccgaatcatgtcatgatggtcatgcagaaagggtataccttaaatggccgtttgttacgcccggcaatggtagccgtatcaaagtaattttagctcagtagtcattttagttcagtaataagtatcaatgccgctccaactggggcggcatttttttactgtggcaactcaggtgtccaattaattggcgcgatgccttgtttttctagcaatgtattggcctttgaaaagtgttgacagccaaagaaccctctgtgggcagatagtggcgatggatggggtgctttgagaacatggtgtttattagcgtcaataaagtagccctttttctgagcatgggatccccaaagcagaaaaacgacgcctgaacggtgctcattgatagcggcaatgactttatcagtgaaagtttcccaacccagattcgcgtgggagtgtgcattaccacgttctacggtgagtacggtattgagtagtaacaccccttgtttagcccaactgattaggcaaccgtgatttggatgctggaagtcaggtatatcggatgccagctctttgtacatattaaccagagacggtggtgcaggaatacccggttgcacagaaaaagagaggccatgtgcctgattagggccatggtatgggtcttgcccaagtatcaccactttaatatcagccaattcggtgtagcggaatgcattaaatacatcctgttgtggcggataaatggttttacctgcctgacgttcttttgcgacataggctagtgtgtcgagaaaatagggttgttctttctcgttaccgattacgtcgtgccatgtgagaggtgcggacatagtaaatcctttttatagattaccaaatggatgttagcttaccgattacaaaatcagaggaaaacctttgatgcacactaaaactaaattcttgataactatttcaatgttgtaaagtatttttgaaagtttacccaaagaattgctgtgtggttagttataaaaacgtatttaaaacataaggtagcagtatgttttatagtaactatatgaaattaactgttctgaatcaatgagtatcctcatttgtgtggatatacccgttatccttcaagttgcctctttgttggctgcactctctcaccccggtcacatagttctctatgctcccggggattcgctcccttgccgccgcaatgcatcttgaaatccatagggtatatataggaatgagacatattggcttgagcaaataaccaagataactcattgatagtttggttgattgtgcgaaatgattgctagcattcaatgcatgaaaaccagattgtggttaagaataagctggatcgttgtttgaatatcgtatgaaaccaaaacggtatgtgttgtaaacagtcagttcctttgactcttttctggctatttattggcaaataataggtaggaatttcgctgttatcagagagcagaatcacagttgattaattttgttaacaaaatttaaacattgatttaacccaatggcattccctgccgatagatgagttgtactgattaaatcgtcgattattttcagctatccttaggggaattttatgagtttatcaattgaaatgaatctatcagtcgattcaagttttcccgttttaaataatcttcaacttgttacaccgccttctgttccagaccaaaatattgaaaaagcgactacagaagttttttccctctcggaaacgactaaacaaaataatagagtctatcaatcattaattaatgaacagagtattaaccttaatttaaagtcaatcacaggaattaagtctgaacaaattagtggtaagcaatctcatgaaattgattatatgttgaccttaatttctgatgatgtctacataagcaccacgatgggaataggtgattatattcgtctttctgatggtgaattattaaaggcaggaatagaaccggcaaatttaagggataaaacaacaggttttcaggcaggtatttatcggaatgacgatctctatatagtggcttttgtgggcactaatgatttgaaggatatattaactaatttacgacaaggttttggatttgatgaggctcaatatcatcaagcaattgatttagctcgcactgccagaatagcatttggggaaaacttgttatttactgggcactctttgggaggtggattagccgcgacagccgcattatcagttggaaagcctgcggtaatatttaattcagccggtgtttctgacaatatgatgaaaaatttgggtttttcaccccaagagggtagggctatcgctgaaaatggattggtgcgccattatgttgtggagcatgatttacttgatgcattacaacagaaactgccagtatctcagccaataggacataaaatcttactgaaatataatgatgattcaggagagtcaggtcaggggtttcctcataatctgatacgtggattaaaagcacattctcttgaaaaggtgctggaattattaacgatatacaaaccttggtcatctttaaatgatgaacagcaagaagaatctctagtcatgcttaatgaaccggatctgagtgtttctgcataattaaagagaagtgtgatgaaaattaatgaagtaattgagcctgaatcggaactagattatcagcggggtaaagaaaatataactccgttacaatgggcgatattcaatcagcaaatggatgatattaataatttgctgaaggagggcgctgatcctactcaacctggtttgcaacaagaaagtgctttgcatacggctgcaaaaatcaacaatcctgattatctcaaatctttattatccgtcgcgccggatgtgaatattatgcatcctgcaaccttagcaacacctttacatgttgcggttcaggtagggagaaaaatgcaagttgaattactgttggtcgctggtgctaatcccaatcaggctaatcggattggggatacgccgttacatattgcagccaaaattaattcgccggaactggcactgatattgttgaagtcaggcgctgatcctaaattgcaaaacaaacaacaatcaacgttccagatgtatttcaatctcacaccgctaaaagcgcgaagttatgagatgcaagcggaatatgatgaagttaatcattggctgaaagctcaacaagtcagccgatattatttgaagtaagataaaaacgggcgatttggcttaatgccagtcagttaagctgactggcctctttttaccggatatttttgctgagaacagcgagtcatcatgatgaagttaccttgtcaggaacgacattgtttgtattttgctcaatttcgcgactaagggaagtatttagaggttctcacataaatttatttttcatcacgtttgcattttaaaaatcttaaactaatcttaataattaagtataaatgttaattattcgtgatctaccctacgctgatttctggattaatggaatgtttctttaaatttccattaattagttatttagaggaaaaacgaattctataactactgggtaactgtctaggattttggagcctgtaatccatgagcggtagcgtatgtcatgattttattcctatacctacagttgtgttcaggctcagaaaggactatcttcgattttataaaaacaggcggaaagtcagattattatattaattataccctatggatttcaagatgcatcgcggcggcaagggagcgaatccccgggagcatagagaactatgtgaccggggtgagtgagtgcagccaacaaagaagcaacttgaaagatgacgggtatataacaagaatgcagataatttatcttattaacttaatatattgagtcgaaatttataaagaggatattttactgagatgaatcttataaataaagaaaaaatccgctatgtttttagtcgaataaaaagaaaaggtgttctaaacacaattagtggtataaataggaagtatatcaaatcaaaattcatagagtcatttttatctaagctaataagtagtaaattagatgtgccagatttccctaagattatacaaatagaaacaagaagtggctgtaactattcctgctcattttgtcccacaaataaagtcaaaatgaaacaagggaaaatgcagcaagaactatttgataaaatagtggagcagttaaaagactttaatggttatatcagtttgttttttagaaatgagccattgatggataagagaattatagattgggctcaaaaaataaaaaacgaaacaaatgcaaaaataattattcagacaaatggttccttattaaatgaaacaattgctaaggagcttggtcaatatgctgagttaatagtgaatgactatactgatgataaaatagtattgaagaaaataaaaaaatgggaggagaatattactgataatttaatatttgtaacacgagataattctgaaagcttgacaaatcgtgctggaaatattggtgaaaaaaagaaggtatttctaaataattcatgtgtaaaaccatttactgaactcacaataacattcagtggtactgttgttttgtgctgtcaggattggatggaagaggccattataggagatcttaaccaccaaagcattcttgagatatggaattcaaataatttaaatgaaattagagaacaattaaagaatagaaatagaatcggaatatgtgaatattgtgattttgttggggtataagatgatgaatatatttaagataatgcagaagcaagtatccaaatgttatgtaaaagggaatgactggaattattcgaaacataaagatatatatttacattttagtgatgagcgttgttatgaagtagaattgaaggaatgtgcacaattatcttatataaagaatgcagatagtatcatattgttgccgacactatggggacgatgtgataaatctgagatcttagaagcaattcaaagaggaatagaacaatgcatcaaatttaattctgtattaatggttagtattcaatctaactatagtcatagagaagatattattgatagtgttcaaaagcttttgaatgaaaatgaggtttacgacaagttgatattgtttcttacagatatcaggagcaaagcatattcaataaatcaaactgttcttttagcaagaaggataaactgttcagcagttggatggatggatgatgatgttattctatctgatgatgcatttttacaattgtatgaagatcttcgtcgcagagggtttatagggagttctggtgcattgaaatgcccgacaccgaaaaaatatcctacttcaaaatttttgaattttgccaaaaataaaatgtctacaaagaaaacaaaatatccacatggctgttgtatgatggtaggtgtctcatcaataaaaaacttgattcctgccagatatatttgtgatgatggttttttcttttttgaattattagacatgaaattagaaaatcctcaaaataatatgaggatcgtggaagagtctatatgtcaacattatgttggagggaatgtcaaagatacatatttccgtatacgtagatccattattagcactgtagtttattgtgctgattatccattggataagtgcttgtattatttaaaagaagttcagttcaatgggttgttcccagccatgtttatcaatatacctattaaagataagattataaaaagtatacttaaatttatattcttaatatggcatgtaatcatattgattgagttgttttttagaagattttcaggaaatccgttaagagaaatagcatggtctgcatattcttgggaaaaaactgaaagtttgaaggaaaaaaaatctttatttgattaataaaattgttttgtcaaactaaataactttccaaaatagggctccacttcgtataacaccttgtgtagcaggagttgtatgcatagcagagcgatgagttagagcctatctcaataggcgtaattgttgcagcctatcaggcaccagacttgcactgcttgaatattaatcaaatagaccaactgtatcggtattatgaaaagctatttaggtcattaaattaataacgtcaaaatagggtttactatggatatttgtaaatatatgtcttcatgtagaaagtcaataatccctatcctcgatccatttaagtttaattatgaaataaatataaatagattattaacttttcaaaaatatgctcctttttgtataatagctagtacggattgtgaaaactttgagatgaaagtgtctccctttatagctgccgcatcaaagattaaaaccatcccgatcataacgcattttcctcctcagaaaccaaacggatttccttcatcacctcacgcagatgcattttttgccacatcagtgataaattccaatgtggaatactatagctctttatcattagagagagagtccatcaagcagagtattgaaaagtatggtgacaactgtttaatcagttctgctgctcttgttctaggtaatgataaaaagtctcaaaaatttgtttattcaaagactgtagatcactcaacagaaagtattgctagagcattggaaggtatagatttcaatttattgaaggttttttacctttactcaagaaacagcgttatttctaatgaaatatgcagttttgtaaagtttattgttggagataatacactgttgtttgttagtggaggaatatcaaacactgagcaggtaaataacctgttatattctggtgctgattttatttcaattggaactacatttgaagaagtcaattggaataacaatgctataaacatattaaataaagaaagaatatattaatgaggagtctctaatatggaaaatgtagttttagtcgatgagaatgataacagagttggatgcattaataagatagacgctcatttaaacggtgatcatcttcaccgtgccttttcctgctttattattaattcaaaaaatgaggtatacattcagcagagagcacagtctaaattactctggcctggatattggtctaactcatattgcagtcacccgagaccggatgaagaaatttctcatgctgtgatgagacgtgcggaagaagaactcggtattgtaataaatgaagaaccaaaatttttatataagttccaatataaagaaaaatataaagatgtaggatatgaacatgaattatgtcatgtctttgttgtttttactgatacaccaccaacggaaaacccaaaagaagtatcagcaggattttttattaatattaaagatgtccaagaatatattcataataatgaagagttttgtacgccttggttcaagaaagagtgggcagatatattacagaaccactttgataaattgtgctaattagcatgtatacccgtcatctttcaagttgcttctttgttggctgcactcgttcaccccggtcacatagttcgctatgctcccgggaattcgcttccttgccgtcgggtatataaggcatttaatcaagaatatactataagtctgcatgatacgaaatatcctctattttgataggtttttataaaagtataccttggtttctaactatggaataaaatcaggttctggaataatgaatactacttggcatgaaaaaaagacaatttataatgatcttaatcaattgcatggagtttatgtcatattgatggaagaatatttatcaacattttgtacaaactttggtggaatgtattcaataccaccgcttgctgttgtctgtgtgaaaaatacagattcaataatagatataattcactattgtaatataaatgagataccaataaatatacgtggtgttgggcattcttttggtacacaatcgctttcaaagggaattgtattagtagtatcagtcgaaaatccggtatttgaaaaaatagatgaatataagtttaaagtttcagcttttgaaacatggttgtctgttgagtgttttttgagaaaaaatggcttatcatttcctatcttgactaggcatcctgatacgactgttggaggaacactttctgttggtggatatggagaagattcatatctatatggcagtcaggcatcatgtattcaatcgtatacgctaataacacctgatggaaaaaggcatagatgttcagaagattcaaattccgaactttataattttggactcgcatcattaggaatacttggtattattgaagatgtgacttttgaagcaattccattaagagtagagaacatactttatgtgatagagtttgatggaattcttcatttactgagttttctgatattgatatctgaatattccaatctgaatattgaagctgtcacatgtcaattataccgaagaaaatactatgttaatatggttctcagcaataattctgatcagattaatattgttaataaggtattagaatgtcaagtgacagggtgtattggctacaaataccattcagtaagagattatagaggaagaacatttggtgcctataggcatgatctctggaatagagactatgttaatctttggggagattattgtgttgatcagaataatattatggcttttgctaatttcctattaaataaagtaattaacaatgacgtttttataagtaataaaggtaggcttcttataattttaaagaaaagtcctagtttaagtaagttctttccttttgagccgatatcgaaaaaaatgagtggaattgtattcggggttggggtgtactttacgtttcctagaaacgaaagcaaagaatatgaaaaattaaagttactgcatagtcaaatattagaagagtgtattttaaatgaaggtcggccttatcttgcgggatggcatgaaatgaaatatgaagataaaataaaaatatatggagatgattatatgaaaattttagaactcaagaaacacttggatcctaaaggaattgtaaataattatgatttttttatggagtattagtgatatggcatatcaatgccatgtagatattctgattttattagtatagaaatgaactaagttaatcagataaattatctacattcttgcaataatgggtaatacgataatctgactttccacttgtttttatgacatcgtagatagtcctttctgagcctgaacgaatcacgttgcaacaacttgccttgaatcaccagcaccgggacgtccgtacacgagggatgggcttgctcgtgcttgccagaggccctataaacgaacccgaatttgctaaaaaatcgccttgctcaataaagttacggccggagcacggttaggctactaccgtctggtctattttgatgaagccggttttgctgcgtctccttcggtgcaatatgggcggagtccatagaaaatatattaaaactcaatcatgtgaagattgtgaatttatatgagattttgagtttatattaacagtttgctgtggggatattacttaaatgaagaagatattgattatttgcatgagaacttgggggagaatgggaaattatgaagcagcaaaaaaaattgaatcagaactagctagtaaagcatttttttctacagaattaatctgttttgatgaattagtacctgtgttcagcaagtttggattaagaatgcaagagatttctgcaagttactatgatcctcacattaaattgaagctatatgatgagttgatagatgatattggtttgtggattagtaatttcaataatgagcaagtattaaatgaatcattatcgagtgtcattgaaaatgattttccatcgttaattatatcgacgaaaggtgttatcgcaaaaatagtccatgcattcaaagaaaaattctattttgatttcaaaacagtgaacttcataactaatcctggtttgttagatattaaaatacatcaacattttagtagtgatttgacgattagaacgacaaattattacccaaattctgatatggttgaaaaatttcatagactagagactgttccattatttaagccagtttcaaactatcaaatcgatcagcaggacattccttctattttaattctctgcaatggatgtgaagaaggttattttgatgtattaaaaacttctttcgaacatccgtcgaaacctaaaatattcatggttattatttcgaataagaaattgtatgatgaatgcatagatttaaataggaagtatgcagatagagcatgcatttataatacattagctaataaggattatctaaaactgatactagaggcttcaacaaacagcagatcatttctatactccaaatctggtccaaacacagtattggaatcaattagattcaatttaccagttctaatacatttctcagggttaccaatggaaagatggatagtggagttgacaaacaaaagaaaatttggtttttgttttgaaaatcaatctaatgggcctggtataataaaaaaatggttggataatcctgagattgtaactaactttaagcgtaacatagaattaagtgaaattgatgatatagatattacacttaaagatttacctgatataatttgtgatgtcatgtaatgattatgaaggaagtattgaatgttcaaaattgaaaaagcgcctataacaacagtatttatagtatgtgtgacaattgtttattccacatttgtttcatattcattaacagatagctttatcggtaaaataagcattatagaactagagaaatatggagggttaacaccaaatagattatatgaatttgagtattggcgacttctggtttcccagttcatacatgttaaacaactgcatatggtctacaatgtgctatcactttcaatattgggaattttattggaaaaacatcttggatctaaatttttattagttttatggtttatttctggtgctttgggaactctttatagcactaactttgttagttacccttggaatattggtacaggagcatcacaagctgttttgggcgtatcttcctttgcattactgttggtttttgtcaaagagcatacctctagtatattaaagtttgctgttgttttttccatgctgccggcaatcgctttagattttatttatgctcattatcctaagcctggtcatgttctttctatttgtattgggcttacaatgagtttgtttttctataggaaaaataaatcttattttgataatgttgctatttgaaaataataattatccacgaataaattaataatgtgagaattttctatgaaacccgctgtgataaaaattaaaggaatagattacagtataatttctatattaatgtggttctgtttaactatatatacctaatggatttcaatgtgtattgcggcggcaagggagcgaatccccgggagcatagataactctgtgaccggggtgagcgagtgcaactaacaaagaggcaacttgaaagatgacgggtataaaaagaaaaggatcttctgtgcgtgatatagttttttttcttgaagaatatccagtcctaacacaaacttttatacatcaacagattatcagtttgaagaaagaaggatttaatgtaagagttgtatctgtttctaaatctagtgatacaatctgtgctaatgattctacaatcccctatgtttgtctagaagatataaaaaacattcatcctatatatgcaatatttaagtttatttatttttctataacctctggttatttcttttctcgaatgagtttatttaaacgaaattgttaccgtaagcgcttgctttttaaatttctatccaatccgtcacaaataaaacctaatgatatcgttataagccattttggtatggctagtatcatggcggcacaattgaaaaaatatggatatattaagagtgcactatatagtgtattacatgcatatgaaatgactaaagaaaagagtcttaatgatctgggaaatcattacggaattttatttgagcaagcaaataaaattttttcagtttgtgaatatatgcgtaatagaatcatcaatctaggatgtcatcctaccaatgttgaggtgctacatctggggatcgatattgatgctctttcatgtttatatccaaatgaatctaataaagaaaaaatgaagataatttttgtcggccgtttgacagaaaaaaaaggattgcctgatttattgttatctctagcacgaataagcagtgaagtgtcatttactttagacattgttggcgatggggagctcaatgattattgttatgaattaatattaaaacttaatttgaatgaacatataaaaatgcatggttttcaaccccatcacatagtcttaaattttatgaaagacgcagatgttttaatacttccatccaaaacatctaactctggtgacatggaagggataccagtggtattaatggaggcaatggctatgaaaaagatagttttgtctacctaccatagcgggattaccgagttaattgaaaataatgttaatggatttcttgtcaatgaaggagatattgtagctttatcagaaaaaatatcatatatagacgagttgggtaaaaaagataaaaatattatgagggagaatgcacatcaaaaaataatgaatgaattcaatattaatattcaaagtaaacatttagctaacataatacttaatgaggaattttctgaaggatgaatacagatgaaatatgacattgtctttatatcttatgatgaaccatgtgctgaatctaattggaatcatttgaaaaatagatttcctgatgcaaaaagaattcatggtgttaatggtatcttaaacgctcataaagttgcttctgattctgtaacggctaaatggttctttgttgtagacggagacagtaaaattagagatgaatttaactttgagttaccagtggaacctttatgctcaactgcgacttatgtatggagaagtgttaactcagttaatcgtttatgctacgggaatggaggtgtgaaattatttaataaaaggttgtttcaggatgttaaaaatttttctggagatatgaccatatctcttagccctgattatcgcgtagtcaatattgttgcttcagatacagtcattaacacaagcagtttccattcctggagagctgcttttcgagaatgtataaaactcagtataccaaggaaaaatcctaaagaagatattatatgtaaagaaagattaacggcatggagtttaattgatactcagatagaatttggtgattggatatcaaaaggagctaatgatgctgctcatttttatgaggaaaacattgaaaatatggaattcttgttatcaaccattaatgattttaaatggttaagagatacgtttaatttaaaatacattcagaaagatagagcatgatgacttcattatcgttaaatttattaggaggtaatggatgttacggcaagtagcaattcttattcctacttataaacgtagttcatcattattacgtttattgaaatccattgaaaaattagagacatcaaataactatactgccattgtggcagataacgattcttctcagaaagagtcttttaacatgatcaatgaaatcaaagatgattttaatttccatattgatgtcattcttgttgaagataaaaatatctcattagttagaaatatgctgttaactttggcctttgaaacatataagtgcgatgcagttgctatgattgatgatgatgagattgttagttctcggtggttagatgcacttattgaatgccagatacagacaaattctgatgtgatacaaggtaacacttatcctatttttttggataaaaaaagaaaatggatggaaaaagtttcattttattaccgagacttattagtatcagattctaaagatataaatgttagcacttgtaatgtatttattgtacgccgagtgtatgaatcgatgaaggagcagctgtttgacttgaattttggtgttacaggaggagaggatacggattttttccatagagcaaagcaaattgggatcagctgtttctattgccgtgatgcactggcctatgaattctatgaccaaaatcgtgcaaatattttttgggtattaaaaagaagttttagagtaggaagaacaaattataggatatttaataataatgacctgagtaaggtatggattactgctctcattattccatttactattgtgaggcttgtttttttcttttggcatccaaacctgtacatacattatttaataaagatatttcgccaatttggagttgtagttgaaggtgttcattgtaatttgaataattgataattattttgaatgagtagctcacatgagtagagtttctgtactaatcccccattataatcagcctatacttattgttagtgctattgagtctataatgagaacttgtttgagtgatgtgcagattttagttgctgatgatcattcatcagaagacaactatatacagctccaacatgttttagaatatttagcaagtaaaactaatttaaatatcaggttgtttaggagtgatgttaatgtcgggacttatcgattgaaaaataatatcatcaatagaattgatactgaatttataacctttcatgatgcagatgactattctgtaccaatgagactaaataacttttcataattataatacactcactctttttattctctgctattcctgtagggacatgaatttaaaaacgttttcactttctcaagcaattgccacatatactgacagccatgatttcgtgtcaccgtttcatgtaaggattgccacagacgctcaattttattcagccagggtgaataaacaggtaaaaacaacagattaaatttaggatgacaagccagccaatctctgacccgtcggcttttatggatactgtaattatccaaaatcaaagtgagggtttcagcatgacaatactggcgttcaagttcttccaatacattgataaataactgagaattcttatttaacccgtcagcataagtcacttttcccgtttgaacattcaggcaacctgcaaaataatgtttttggttttttcctggtgtcactatacgtttctgttgcccttttaaataccagtcagccccgatttttggattcagctcgatgtcgacttcatcttcataaaaaacgggatgtttttctgaacacgttgacaatgcctcggtaattttcgccattttttcatggtactcgggatcgggtaatttaagcgtcggggctgcccttcgccacacgatacccattttatgtaagtaacgatagaaggtactgatggataattttatgtttaataattcattgattttaattataaaaaactcaagactccagcgagaacgcaggcagcccaattgctggggagaatattgcaataaaaaagacagtaaaggataaagcgggattaaattccagacagcgggtctgcccacaggcaggcttttgagtccttccagaccatataaagtcaaccagtttatccagcgatagacagaagaacgactggcgcaaagggttttggcgaccagagagacagactcgcctcgatgcagcatcaatatggccatgagcctgcgagcataatctttatctcgggtgttctggataatttttttcatctggcgtcgttcattgcggggtataggtgctatgataggcataactcagtccgtttagtggtttgggattatctacaattgatcagattgcaaaaattggactgagttccctccaagtgttctactattttgaaaagttatttagattgcctgtataatctgatgaacaaaaatagtcatattgatatattaggtacttcatatatagatttctaccaaaatttccatacggttaactcatttcgcattaagaagttttatagaatcccttatattgcacatcaacttggtaagaagtatctgagttttcaacctactcagttaattagatttagtatatttcgtacccttggtggttttgatggtacaactagaattgctgctgatgatgattttttacttagggctattcattgtgtaaaggtcaggaatattaaccgtcccctctatgtaaagatagaaagagaaagctcccttaccacatcgtctattactggattccaatcagaaacgagattaaattatattaagaagctagatcaattacgaaatacaataaagagtaacttaccattatcagagtatatgaacaaacccaacgatgttcgatttcacctgaatgaaatcgagttaaaatagttgaaatgttttgatgtgaaatatgctgtagtttccagtgaatgatttttatatttttcgtgacagatattctaagcgaggtagtatggacgacattaaagaatgcttaaaagaaattgtagaaaaaataaagagagaagaaaaagtcttagctattcttggatatggatcatattttacaggtaaatataaaaatggaagcagtgatattgacttgcttattatacatggaagtaaaattgatttatttagaaagaaggtagtctatcgtgaagtagaatttgaacttcggtatatggcagaaaaatctttagtaaaacttttatctcataagcatggaccaacaataaagcatatgttggattcagagattatttttgataataaaaatatagcaagagaattgaaactaaaaacctattctatagtcgagtcacctattgtagaaacattttctatagaaaatagaaggaaaagtgcattgctaattgaaagcctataccggaaggtacatcaagtgaaatatgaccttggatttttcgaatttgcatgttctaagtttttgctcaatattgcagattcttatatcagacttcatcgtcattgggggctgcaaggttttcgcaaaatgattagccagctcaaagatattgatgaaagttttgctgagcatttctcactggcaatgagtcctaatcatatagaaacaagaattaaggaaatagattttctttatagagaggttattatgcttcttggtggtgaaacaaattctgatgaaaattttgtgagtcagggcattatgaacatactgaatgtggttgataactaaataatattccaaaatagtgctatatgtattttaattaggttttctaattgggtaatgaactaacttgttgctgaatccacggttatttcattgttgtaaattatattaatattatccaggaatttagcatgaaaatggatgtggcattgaaggataactttgcgacaggttatataaaatctttattactatactctttactattaagtgtcattagttcttttgctgcattttttatgcagtatctgattgacgcggttataccatcaggtgacttgcgttttttatttatctttatgatatcctatctattatatgaatcattcaatatgatactaacttatttgactgctcgctttagagcatcactggaaaaatatttggactattattatttagataaatatttacttgctttgattactacaagattatctatattgaatgattataataaaggtggattgattcaaaggatttatgatgctcaaaatattaaaaagtattatttgactctgctaatagatattgttgttaagcttattacgattttaatattatcaatcatagtgctatatgttagtcctctagttgtcagctttttgatcttaggaatgattatgctggtgattgtctattttttgtctgtcaagaaaatgattattttagaagagcagcgttttaaaataaaatcaaattttctttcaattatggatgatattattggaggaagggaaacgatacgaggcaataactatcgaaacaggattctgaatagatgtgttgacaggatgaatgattttttgaatagggagaaaaatgttgcattacttgttgctggtgtgaaaagtaaaacgctaacagttaacacaatcattggtactgttattagatgtgtcatggttattagcattattagatatagtagtttttcactaggtataatgttgacattaattgcttttacagaaatgtctctaaaacatacaatgcaaattttagtttcttttatggagttgaaaagatcaagcattactcttgaaaggtataaagaattcatggggaataatgttgtagatgagagtttattgaatactgaattagatgataatattgttagtgtagacgaaattacagtgaggaatcttcatattggtactaatggaaatatcgtctgtaaaattccggattttacctttcaaagtaataagatatacccgtaatcattgaagatgcttgattttatccgaaatggagatcattatcctcgctatgaaaatattcattaccgatgaacaaaaagccgaacttgaacatctccatcacacctgccgtgataagagggagtgtgatcgcatcaaagcggtcctgctggcctctgaaggctggagttcagtgatgatcgctcaggccctgcgtcttcatgaaatgaccgttaaccgtcatatcagcgattaccttaatcaaggtaaacttaaatctgataatggggggtctgatagtttgctttctcaagaacaaactgattttttaatcaatcacttatctcaacatcttttccatcacacccatgaaatcgtggcctatgttgctcagctctggaatattacctttagcattcccggcatgaataaatggctacaccgtcagggtttttcttataaaaaaccttgtggcgtccctcataaattcgacgcagaaaaacagcgacaatttattgaatattatgagaatcttaaagtcacagcgaaagacgaacccatcctttttcttgatgctgttcacccgactcaaggcaccaaactcggttatggctggatgcgaaaaggcgagaaaaaaacagtaaaaacaacaggaagccggactcgcctgaatatattgggcgcgctcaacctgaatgccattggtcgtacggtgttccaggaatatcaaaccatcaatgactacaacatttgctgttttttcaatgaaataagaaagtcttatcctgactatcatcaaaaaattcatcttattgtggatggggcgggttacaacaaagctcatcttgttaaggagtgggcttatgttagcaatattgagttacattaccttcctccctatagcccaaatttaaacccaatagagcgattatggaaggtcatgaatgaacaggttcgaaataaccgttattttgcggataaacatgaatttcgagacaacgtcttcaaatttttcaccacaacgctaccggatatagcggactcgctgatgtctagaattaacgaccattttcaggtgctaaaaactgcatcttgaagtttcttgggtatatataaaataataggacagaatggtattggtaagacaactttatgtaagactttgattggtttgattccacctgtaaatggatctgtgaatttttatgtttctgataaaactattaagcctgaaattcatataaatcaatgctctgcatacttcccacaagatatactctttactacaagtattattgaaaatattacattaggaagagacgttgataggaataaagttgagagtatgcttaaaaaattaaatttatggcagacaatagatagcttgcctgaaaaactagataccgttattagtgataaggttaaccctttttctgaaggacaaagacaagtattactctttttacgaggttatctgtcagataaatcggtattgatatttgatgaaatatttagaggaattgataatgaaaatgctaaagtcgtaagtaaattaatttcagaaaaagaaggttgtattatattctatgtcgctcatgattttactatcgattgtgaaaatcatgaagtgttagagttgaaaagtgaaaaggactatgatttcttcaaactagaggcttttaatgaataaattaaactctaataatgaagttaagtcagaactgcataaagaatataaattaattataagtataacagtttttttgctgattatatgttttgctttatcttttgttgtgactataaagaggcgagttgttttagaaaatgcttttattaaaaccgcaccagagcctgtattattttatgcagaaaaggatatagacattaaaaattataatgttcgtgatggtgatgtggttaaaaaaggagattctatttataatgcgattaatccagatttagaggaggctgaatctattttattgcaaaatataaaacgagataatacgaaaattaatgcgatggaaaagtatatagataatgtctatgagcggatgaagattgaaaaaaattatgaggattttaagtttaataaaaatgaaagtgagttaaaaaatatagactctattttgaaagaccatagagatgactatgatttttttagtcaaagctacagagaacagatgaattttgtagataaattgttaaatcagaataataattatttatctaagaaagatattattaaatataaaatggaattgttctcatcacgtcgtggcctgattaatcttgaatctgatatattagacttagagaaaagaaagtacagtttagatgatgagcagagtagatacataattggagcaaccaaatataaagagttagatatggagcttaaccagttaagaggtgaactctccgttcttgtctcagaattgaatgtaaaaaacacagggatggagaatataaagaatggtaagttgagaatagaaggaattgcaaaagctgatggtaaggttgagtttaataatattaatggcatcaggcctaagcaggtaaaaaaaggcgagttagtttttactatatatcctgatggtaatcactttatagcaaaaggagttgttagtgaaaaatacattagaaagattaaaattggacagagcgtagaattaaaaatggatgcttatgattatctcaagtatggggcaataaaagggaaggttgaggctatatttggcgtaaaaaacggtacggctgaaattgtgattaatattgttgataaaagggattttgatttagagtttggtaattcaatcaaggcgtttatcatcttggatgaagttaatttgtatgaatatatatatgaaatagtatttccatatgttgcttaatagtcttattacttaatgtggtattgttgaaaaagttattttttacaggtgttttagtgttagtatgaatatactcaatagatttcaagatgcatcgcgacggcaagggagcgaatcctcgggagcatagagaactatgtgaccggggtgagagagtgcagccaacaaagaggcaacttgaaagatgacggatataaatcttggattcgactaataagctaccgtcttgatgggcaacaatacgataaagattacgtcagtgtcagaccgtattaatcactgatacagacaaatattaactcttaacaaaagggtgaatgcagaaaggttgctctggcagccagcgtgatgacaacgacaggtaagatcgggactcactaaacctgaatgttattctgagcttaaagctcgttggagaaataaggcgtgagtcagcggattatataggagctcgcagctttaaaaggctgcaaaaaagccggatttaaagctgtaacctatctgtcagagtcaaaatgatggaggctgcttgcaagcgggacgttcatataaataacatgtcactgaccaccattattaaagataccccaatatgggtttggattctttttgcttttctcatcaggcgcgggatcagtgccttgtacgatcgtgaaatgcgaattgatcgccttttcttactaccaatagtattcctggtctggggagtatatagcgtcatttatgaaaccacattctcagatttagccttgataacgatgacagcgggtttattcgtcgggattgtaataggatggggtctgtggcgttctcaaccaagattacgtgaaaaagcaggcagtgatttaatcatccgtcctggtacttggttaacgctgacgctgattgttatcacatttatcgttaagtttattattacggccatgttaagtattcaccctgcgttgttgcattcgttacacttcaatctgttttttggctttagcaatggtgtgcttgacggtattttctggggcggaacgttaaatctttttattccttggtgcagaaacaggaccaagagcatctacaaatagcgtttatgaaaccaaatagtgtgattgcaaaaactcgggatggcaaaatagctgatgaattatttaaagaaataaagaagcgtttgcttggagcctatttactcacagaagaatcttactatgtgaaactgcatattgtaattaacgggccaattggcccgtttaaagatttacgcatcgctactgactggcgtttctggttttggattaccagaaggtttacggcgtttaccgatatttttactatctcgatgacgtattttggcttttttcttcgattcttccgctttctttttctctttacgtttagccaatacttttttcgatggcttattgcgggctttgtcacttggtgctttagtggttgggcgaagttcatcaaccactcgcgacgttagtggttcattcagatagcgactgattttgcctaataaaggatgatcatgcgcttccactaaggtaattgcagtacctttgcgacctgcacgcgctgtccggccaatacggtgtagataaacatcggcggtgcgtggtaaatcgaaattgaaaacatggctgatatcatcaatatccaatccacgggcagcgacatctgttgcaaccagaacagtgacactgccatcgttcaggagcttaactgcttccgtccttttagcctgtaccatttccccttcaagaaaccgggctttaatgccagcttgatgcaatttatccgcaagttcgtgtacacgttcacgtttgcgaacaaaaataatggatttagtgacatcgggttgttttagtaaatggcaaagcagggctgttttgtgtgccgaattatcggcacggtagtaaaattgctggatttttttgcgctcacgacgtgacggttctgcatcaatctcaactggatcttccagtaaacgttcagcaaaatcacgaatggcttccccttccagagtcgcagagaacagcatggtctgtttgcgccaacgggtttcacccgcgatggtttcaatatcgttggcaaaacccatatccagcatacgatcggcttcatcaaggataagtgtttcaactgcccgacaatcaaagttttcttccttgatatattgcagcagacggcctgtagtggcgacgacaatatcttgattttcgctgaaaatttcagcgtgattcatataggctacgccgccagtaatggtagcgatatccaaatgggtatgtgcagcgaattcttttgcctgatctgccacttgcatggctagctcacgggtgggcgtcaggatcaaaatacgtggtggtccagatttcttgcgtggaaaatccaataaatgttgcatagcgggcagcaggtaagcggcagttttgccggtaccggtaggcgctgatcctagtacatcacgcccgtccattgctgccggaatagccgcagcctgaattgctgttgggcgggaataacctttatcattcagggcgtcaagcaggcgttcatcaagctcaagttcagaaaagtttgttgcagtcatcatatacctctttttaggccgccgattataaacaggttgggcgtattgttcatctaatattaaagcggtcaatttaaggtagatataccctatggatttcaagagggatcgcgacggcaagggagcgaatccccgggagcataggtaacgatgtgaccggggtgagcgagtgcagccaacaaagaggcaacttgaaagataacgggtatagcttttatcgaaacataataacccttatcctatggcgaaatttattgtgctaaatagatacaggttattaatttgaaacagaaacgacttttacgccgggatggatttactttcaagcaattttttgttggtcatgatcggtgtgcgatgaaagtcgggactgatggcgttttattgggagcatggactccagtgagtgacaaaaaagcgattttagatattggctgtggcagtgggcttattgcgttgatgctagcacagcgtacggatgaaaatactaaaattgatgcagtggaactggatacagaggccgcattgcaggcacaagataatgcagaacaatctccgtggcagagaaaaatagatgtttatcagcaggatattggtgatttcgctgaacagtattcgcaatgttatgacttaattgtcagtaatcccccctattttgaaccggctgttgcttgtcgaaatgaggcaagggaacaggctcgttatacggggtcgatgactcaccagcagttattacaatacgccgagacgttgattacagcggatggtctgttttgtgtggtattgccatatgccattggtgaggaatttgaaacaatggcatgtcatcagggttggttttcccatcatcgggttaatatccgcgataggcaaggcaagccattgcatcggatgttattggcattttcccgtaaggaaaaaactggcttaatcagtgaattgactattcgtcagccagacggtgcatatacgcaagaatttcagcaattggtgacggatttctatctctattattgaatcatttattgaattattgaaagaaccacgccggagcgtggttatatagaagttttgccagcaaaaatcagggtgtcaaaatcgttggttttgattctggtagtaaatcgggataatccagtgtgaagtgcagacctcggctctcttttctttctagcgcacaacgtacgattaattcagcgatttgcaccagatttcgtaattccagcagattgttagaaatcctgaaattagagtaataatcgtgaatttcctgttgcagcatattaatacggcgcagtgctcgctctaagcgtttggttgtacgcacaatgccgacgtaatcccacataaatagacgtaattcgtgccagttgtgctgaatgacaacttgttcatctgaattgtcaacccggctctcatcccagaaagggagttgcggtacttcttctattgtttcgatctgttgttggatatcctccgcagcagaccagccatacaccagacactccagcagagaattagatgccatacggtttgcaccgtgcagacccgtatagctgacttcaccgatagcatataagttgttgaggtcagtatgtccctgatgatcgacaacaataccaccgcaggtgtaatgcgcggcaggaacgattggaatcggctcttttgttagatcaaagcccagtgtcagcaatttttcataaatcattggaaaatgctggataatgaaatccgctggtttatggctgatatccagaaacatggagtcagcaccaaggcgtttcatttcatggtcaattgctcgtgctacgatatcgcgaggagctagttcagcgcgttcatcaaaatcgggcataaagcggctgccgtctggtcgtttcagatatgcgccttcacctcgcagggcttctgtcaacaggaaagtacgcgcctgtggatggaacaggcaggtcgggtgaaactggttaaattccagattggcgatacggcagcctgcgcgccatgccattgcaatgccatcaccggatgagatatcgggatttgtcgtatattgatagaccttagctgcaccgcctgttgccagtaccacaaccttagcgcgataagtttccacctgttcttgctgacggttccagatataagcgccgacgactcggttctcaccgtctaaccgggctttatttgacgtaattaaatccactgcgttgcagcgctctctcactgtgatattcggatgagacatcgctttatcaaccagtgtcgtttctacttctttgccggttgtatcagcatgatgcagaatacgacgatggctgtgaccaccttcacgggtcagatggtattgtttttctccatcttcgctggtttctgtatcaaacataacaccgtgatcaaccaaccattgcacgcaatgacgggcattactggtgataaactcaacagcacttttatcgcaaagccctgctccggcgataagggtatcttcaacatgagatgcgatactgtccgttttatcaaatacagcggcgatacccccttgtgcataataggatgcaccttcgctaagaatactcttacttaataccgtgattttatattgtgaggctagccgtaaagccagagatagaccggcgacaccgctgccaataataagtacatcgctgtaatgttgagaggataatgattgcataattgatgatgtatgaatgaagatgggtaaaaatcatgttagcctatcagatatgatcaaagctatgattgcaacaaaatgatgacaaaaattgaacttcgcagaattttattactcaaagctatgcttgctcaggaatagaacatcatggttggttcagtaaatatcaatgtggagcttttcttcgggagatttaacctcggatgagcgagcagttaacggatcaaatgctggtcgagcaagtgcagaaaggtgaccaaaaggcgtttaacctactggtagttagatatcagcataaagtggcgagtcttttatcccgctatgttccgcagggtgatgtgcctgacgttgctcaggaaacatttattaaggcctatcgggcattggcttcgtttcgtggtgatagtgctttttatacttggttgtatcgtattgcagtaaatactgcgaagaattatctgaccgctcaagggcgccgtccgccatccagtgatttggatgccagtgacgcagaaaattatgaaatttcgagtgcattaaaagaaatttcgaaccctgagaatttaatgttgtcagaagaattgaggcaggtggttttccgtaccattgaatctcttcccgaagatttgcgaatagcaataatgctgagggaattagatgggttaagctatgaagaaatagctaccattatgaattgcccggtaggtacggtgcgttcccgcatcttccgtgcaagggaagccattgatgataacattcaaccactgatttaaaattaaaaatagtggaacaatactgaagggtactttggcatgcaaagagaaaaactttccgcactgatggatggcgaaactcttgatagtgaagtcgttagtattttgtctaaagattctgttatgcagaaacactgggaaaattaccacttgatccgtgacacattgcgcggtgatgtgacggaagtattgcatagggatattgctagccgggttgcatttgcacttgaaaaagagcctgttcattctaaccttggggatattcctgaatctcagcctcaaccagaaacttggcaaaaaatgccattctggcaaaagcttcgcccttgggtgagtcaaatgactcaagtggcggttgctgcctgtgtttcgctggccgtattggtaggtgtacaacagtacaacagtcatagtgcagaggatcttgaatatcaatctgatacgccggcatttaacaccttgccaatgatgggttcggcttctccggtgagtttgggagtgccttccggtgatgatgtatttggcaatgatcaacgccttcaaatgcaggagcgtaataaacgtattaatattatgctgcaacaatatgaactcgatcgccgtgtgcattttaagcaaaatgatgaacggggaatttcaccacaggttgttattccggttcccggaacgcaatctttaggaacacaatagcagtaatgaaacgtatttggttctccgtctgtttgctggcgggcagcctgtttgctcctttacaagcctcggcgcagctcagcagtgctgaggttttgttgcaggagatgggtaatgccactcgctctctaacttacgagcttgcttttattaatctcaacccacaggctattgtctcggttcgttatcgccacgctattatcaatggtattccaattgctcagattatgcagatggatggctctcgtagggaagttgtccagcgcggtaatgagatcagttattttgaacctggattggatgctttcagtcttagcggtaatcatattattgattatttaccggccgtcatttttgctgacttcaatcagttgaaaaaatattacaatttcattgatgttggtcgtacccatatcggtgataggccctgtagggttgtacgcatcacctccaaagatgaagtgcgttataattatattttactgatcgacgaagagactcatttaccattacgtattgacttacttgatcgtgatagtgaggcacttgaacaatttagggttgtttcttctaccattgatggggatatcaatgatgcaatgagtgtgattactcgcttaaatatgccgccaatgctggtcattccaccatcagagaaggttgtatttaattggaaggtgggtaaattgccgattggtttcgttgaggtttcgcgtagccgtcgtaaattgccaaatagcggcacacttgaatctgttatgttcagtgatggtttatttagcttttccgtgaatgtgactaatgctgataaaaccggtaagttggaatatcctctccgtcgtggggcccgaacgatttatagtgcaatacgtggtgcaaatgaggtaacaattattggtgaattaccattggcaactgccaagcgtattgccgctggtgtcgcatttataggagctgactgatggttaaagagtgggcaacagtaattcactggcaacaggggcgggcattattacgttatggttcctcttctggttgtggcagttgtcaggcgcgagcaacgtgtggttcttatttactcaataaattagggtctgatggcatacatcagcttgaacttgagattttacaaccgctgcaaccggggcaaaaagtggaagtggggatccctgaagggagtttgctgcgttcggcgttgctggtttatctgactccgcttattgggctattccttggtggtgcacttttgcagttatggataaccaatcaattgtgggtgttttgtggcggtgttttaggaggcgcgttggggttcttctttgcccgcggagtcgccacttactgggataatcggcaggaatatcaacctgtcgttttgcaaatcggcttgcctcctgatgccattcacattcagcagcgggaataaacctactttaatcatccagacgtctaacaattcataccttaaagccacaggcatgactaggttttcgtagatttggcatgtagaatacagcctttcaggccggtggccgacctaataaaccgtcgctttatgtccctctgtgtgtccatataggcgaatgattcagaaatatcaaggcagaaaaatatttataatgaagcaaatacgaaatttctccattattgctcacattgaccacggtaagtcgacgttatctgaccgtattattcaaatttgcggtggcttaacagatcgtgagatggcagagcaagtgctggattctatggatcttgagcgtgagcgtggtatcaccattaaggctcaaagtgttaccttggattacaaggcgaatgatgggcaactctatcaattaaactttatcgatacgccggggcatgttgatttctcatatgaagtttcccgctcactagcggcctgcgaaggggcattgctggtggttgatgcgggacagggagtggaagcccagacgctggctaactgttataccgcgttagatatgaatctagaagttgttcctgtgctgaataaaatcgatttgccagcggcagagcctgagcgcgtagcggaagagatcgaagatattgtcggtattgatgctactgatgccgtgcgctgttcagctaaaacgggggttggtgtacaagacgtcattgagcgcttggttaaagagattccagcaccggaaggcaattctgatgagccattacaggctcttatcattgactcatggtttgataattaccttggtgttgtctccttggtgcggattaaaaacggcaccttgcgtaagggtgataaaatcaaggtgatgagtactggtcaggtatataacgctgatcgtcttggcattttcactcctaagcgtgttgatcgtgatgtattgggttgtggcgaagtgggctggttagtttgtgcaattaaagacattcttggtgcgcctgtcggggatactttgacattggcccgtcaacctgcggaaaaaccacttccgggctttaaaaaagtgaagccacaggtttatgcagggctgttccctgtcagttctgatgactatgaagcattccgtgacgcattaggtaaattgagtctgaatgacgcttcgctattttatgagccggaaagttcttctgcattgggttttggtttccgttgcggtttccttggtctgttgcatatggagattattcaagaacgtctggaacgtgaatatgatctcgaccttattacaacggccccaacggttgtgtatgaagtggagacaactagccacgatactctttatgtggatagcccatctaaactaccgccgctgaataatattgaagagctgcgtgaacccattgctgagtgccatatgctgttacctcaggagtatttggggaacgtcattaccttatgtgttgaaaagcgcggggtgcaaaccaacatggtttaccacggtaaacaggttgcactgacttacgaaataccgatggcggaagtggttttggacttcttcgatcgattgaaatctacctctcgcggttatgcttcgctggattataatttcactcgtttccagtcatctgatatggttcgtgtggatgtattgattaatgctgaacgagttgatgcattggcattgattactcaccgtggcaatgcacagtaccgtggtcgggaactggtggagaagatgaaagaacttattcctcgtcagcagttcgatatcgcaattcaggctgcgattggtaatcatattattgcgcgctcaacagtgaagcaattacgtaaaaacgtcttggcgaagtgttatggtggtgacgtcagccgtaagaaaaagctattgcagaaacagaaagagggtaagaaacgtatgaaacaagtgggtaacgttgagttaccacaggaagctttcttagccattcttcatgttggtaaagacaattaataagcttgtaaggagtctaaatggctaacacttttgccctgatcctaacgttggcaacgttagtcaccggcattatttggtgtattgatcgtttcaaatgggcaccagagcgcaagaaaaaacttgccagattgcaggagctgactgagggtacaatggatcaggagcatctggctgagactattaacaagccaacatgggtggatacctgttcatctatttttcctgtgttagccgtggttctgatcctgcgctcttttgtttatgagccttttcagatcccatcgggttctatgatgccaactttattgattggtgatttcattctggtagagaaatattcatacggattgaaagatcccatcactcaaacaacattgattaagactggcgaaccaaagcgtggtgatgttgctgtatttaaatacccgttggatccaagttttgactacatcaaacgtgtggttggtttaccgggtgataaaattatttatgatccggcaaagaaagaattgcgtattttttctaattgcagtgagacagggaattgtcagggagaattaccggtttcttacggttcactatttccaagtgagtggacaatgcagcaatatggtgttgactccaaaggtgaaagtttgagaaaggtaggtgttttccaaatccccgttgaagaaacattgccgccttacagtatgcggcagggtgaacgaattgagaatttggacgcagtgaaccatcatattttggagattcccggtgtactatcggtacctaatttccgtcagcctggcttgccagagggaatgtggattgtgcccgaaggtcactattttatgatgggtgataaccgtgataatagcgctgatagccgtgcatggggctttgttcctgagaaaaatctggtcggtcgcgcttcagctatttggatgagttttgaaaaacaggaaggggaatggcctaccggagttcgcttcagccgtattggtggaattaattaatattcttatattagcgaagcattaattttactcgcagtgtagaatgtcctttcaaacttaaactggctcctataaggggccagtgcaaacgcaacagttttgtcgggggttcctgtaacaggtctgttgcgtgtgcgtttttatttgacgaattctgaccgatattggtagcacatgaatcccatcgtaattaacagattgcagcgtaagctggggtacacttttgatcagtatgatttgctgatacaagcgttaactcatcgtagtgccagcagtaaacataatgagcggctggaatttcttggtgactcaatcctgagttttgttattgccaatgcgttgtatcatcgttttcctcgtgtagatgagggggatatgagccgcatgcgtgccacattggtgcgtggtaataccttggctgaattggcaagggaatttgaactaggtgaatgccttcgtttggggccgggagaattgaaaagcgggggttaccgtcgtgaatcgatactggctgataccgttgaagcgctgattggtgctatcttccttgatagcgatattcagtctattgaaagaattattctgagctggtacgaaacccgcctgaatgaaatcagccctggcgacaaacagaaagatccgaaaacccgtttacaggaatatttgcaagggcatcatctgcctctgccatcatatctggttgttatggttcgtggtgaagctcacgatcaagaatttactattcactgtcaagtgagcggtattgaacagccggttaaaggaacaggctccagccgtcgcaaagcggaacaggcagcggctgagcaagcattaaaacaactggagcttgaatgagcgaacaagaaacctattgcggatttgttgcaatagttggacggcctaatgtggggaaatctacgctgctaaatcagcttttaggtcaaaaagtatctattacttcccgtaaaccgcagacgactcgtcaccgtattatgggtatccatacagaaggtgcgtatcagattatttatgtggatacgccagggttacatattgaagaaaaacgggcgattaaccggctgatgaaccgggccgccagcagttctatcggtgatgtggagttggttatttttgttgtcgaagggactcattggaccccggatgacgagatggtactgaacaaactgcgtaatctacgttgtccggttttgctggctatcaataaagtggataacgtgaccgataaaaccagcttgttgccacatattggttttctcagtaaacagatgagttttcttgatgttgttccaatgagcgctgaaaaaggcatgaatgttgatacgattgccaaaattgtgcgcggatatataccgaaagcggctcaccatttcccggaagattacattactgaccgttctcagcggtttatggcttctgaaatcattcgagaaaagcttatgcgttttcttggtgatgaattgccatattctgtcacggttgaaattgagcagttcgtggcgaatgagcgcggtggttacaacatccacggtttgattctggttgagcgtgaaggccagaagaaaatggttattggtaataaaggcagtaaaatcaagaccattggtattgaagctcgtcaggatatggaaaggctgtttgatgcaaaaatccacttagaactgtgggttaaagttaaagcgggttgggctgatgatgagcgagcgttacgtagcttgggttacgtcgatgatttgaaataaggcatcctcctgtggacggttggcaacgtgtttttgttcttcatgggcgtccttacagtgaaactagtctgttactggatctgtttactgaaaatgaagggcggattagcgtgttggcaaaaggtgcgcgtggccgtcgttccaatttgaaaggctgcttgcagccctttaccccattgctggttcgttggagcgggcggggggcaattaaaacgctgcgtgatgcagatcctatctctctggcccttcctcttaccggcagtgtgttgtatagcggtttatatatcaatgaattgttgtcaagagtgcttgaacagggaacggcttatcccgccttattctttgattatctccaatgcttgcagattcttgctgccagtgaatatacaccggaatatgcattacgtcggtttgaactggcgttgctggcaaatcttggttatggcgttgattatctgcattgtgcgggcagtggtgaacctgtcgctgacacgatgacctaccgttatagagaagaaaaaggatttattgctagcttggttgttgatcattacagttttaccgggcgcgaattaaaatcactggcaactcgtgaattccctgattctgcaacattaaaggcagcaaagcgtttcacgcgtattgcattaaaaccttatctaggtggcaagcctttaaaaagtcgtgaattatttcggcagtttgtacgtcagcagcctgaaaagaaagaaaactaatgaatttgtttctcttcaagatggaaagtgtaaacttgtcatattctaatatgactataccctatggatttcaagatggatcgcggcggcaagggagcgaatccctgggagcatagagaactatgtgaccggggtgagtgagtgcagccaacaaagaagcaacttgaaagatgacgggtatacaggagataaatatggctgaagtattattaggcgttaatattgatcacattgcgacggtgcgcaatgcccgtggtacccattatcctgatccggttcaagcggcttttgttgcggaacaggcgggagcggatggtattactattcatttacgagaagatcgccgtcatattaccgatcgggatgtcgaactgttgaaaaaaactattcagactcggatgaaccttgaaatggccgtgactgatgaaatggtggatattgcctgtcgtattaaacctgaattttgctgtttggtgcctgaaaaacggcaggaagtgacaacagaagggggcttagatgttattggtcagaaagataaggttgctgcggcggttaagcgtctatctgatgcgggtattcttgtctcgttatttattgatgcggaacatcgacaaattgatgcggctaatgaagttggcgcacctttcattgaaattcatacgggtgcttatgccgatgcaaaaaatgaagtagaacaggaaaaagagtttcatcgtattaaagcagccgcgacttatgcagcgagtaaaggcttaacggttaatgcgggtcatgggctgacatatcataatgtacaacgtattgctgctctgccagaaatttatgaattgaatattggtcatgccattattgggcgtgcggtatttagtggtttaactgctgctgtggcagatatgaaaacccaaatgcggaaagctcgccgttaatggctattattgggttaggtacggatattgttgaaattgcccgtattgaaggggttgtcgagcgctcaggtgagcgcttggcaaaacgcattctcagtgaattagaatgggaacaatatcagcaacatgaaaaaccggttcgttttttggctaaacgctttgcggtaaaagaggccgcagcaaaggcattaggaacgggcatccgcaatgggctggcatttaaccagtttgaagtggtcaatgatgcactgggaaaaccgattttgcggctctatggtgctgccgcagcgttggctcagcaattgggggcgacctctttgcatgtgacattagctgatgagcgccgctatgcctgtgcgaccgttattcttgagcgctgatttcagattttatctgcatgatgcagtaatacaaatttatcccacaattgttcttctgtttcttgacggtctggatcgataataatcgtattgtttatcgggcagactgattgacaggttggcgaatcataatgaccgatgcattcggtgcaacggtcggcatcaatctcataaatttcatctcccatcgatatcgcctgattgggacattcgggttcacacatatcacaattgatacagctttttttgattaataacgacatttcaatagattaacttatttttcattttaaatcagtgtgttattgatggttcttatttattactattacacacttcttatatttctatacccgttatccttcaagttgcctctttgttggctgcactcgctcatcccggtcacatagttatctatgctcccggggattcgttcccttgccgtcgcgatgcattttgaaatccatagggtatatacagcataaattacattgaaaaaccaagtctggcaacataagaccataatatatgaaattttttctgtcttagctgtattattcggttagctatataaggaatttcaataacgtgcaaggtcaccaatattgtatgggctaacaagtcgtaggtgataatagttcgaattataacagaatatttacggctatagtattagcaataaaaaaataattaagaccgggcgctatactaatcccggtctttttgttaattacgataatggcggagttggccagtcaatttctggtgcgtttgaagtgtcaactcggttaagcatcattcggtattttttccattctttgagtaatagcatctcttcgtctgttgctatatcaagttcttctgcatcagaaagtggggttattttttatttgcgagagatataaactgctttatttgatgagctaaatacatagttcttgccattcatattaatatcctacagctctataatatgctgctacagggttttgtaagtctgtaatactgctaaaacattggaactgagtattatcgactatcattactgagaatatccctgcgtattgaggggcagtaccaaggtgagttaacgtgacattgagacatttattagggaacggaattggaaatttattcaaattaccaggtgaggaaagagcattacctttaactaacgctgttccccacatttcaattaaccctgagggtaatttttgccagccggtttcagctaaatttttggtgaaaaaggacatatctggaatctgattaaccccaattcctacttcccgttttgccgcttcatttaaacctaaattttttaaaaacgcatttttattgggaatgtctgctccgttttttgctttttctaatgcggagtcggaaattttagttataatttttcgctctaacgctctatttaattgggtggtgagtttggttatattaccatcatccaaaacatcactgtcagattctgtcgcaataaaatcggctacaacagatgatattgtggaagactgacgtaatgccttatttaatatatggagggtaagaccgtctggtgaaaatccagtctgcaattctggactattttcatataaattttgagctaccacattagcaccatctctaatagaaaacgctttaaaatcattctttggattcatatcaattttcctaaggtttaatagtaggtttatattaatatcttaaattgttgtaagtgtaatttactgcctcttatagtttaaggataaaaaacaataattaaatgtttttataaattatgatgttaatagtttttatatgctttgagcaataaacaattcgatactatctaagtaattaatacttattttatagaaactattttaaatgattttcctattaaaagattcattgtgggaagtagattttaatgacgttcgtggtcattaatatcgtatgaagaatagttctgatgataacagaatatttatggctgtagtgctggcaataatacaataacaaaatgataaaggccggggtttaccttaatcccggcctttttattaattacgataatggcgaaattggccagtcaatttccggtgctgttgaagtatcaacccggttaagcatcacccggtattttttccattctttaagggatagtatttcttcatctgttgcgatatcaagttctactgcatcagccagtggggttattttttcatttgccagagatataaattgcgctctttgaacttctgctatggatatcaatccctcttttgttggtggtggaatatcttcccaacaaggaagaccctcttcgtcagaggaaagtatttttcctgtgggcgggattccagagaacgtattaaatatgtcatcagttacagatatagggtcatttggccatgagccagcttcaatatactcctgttgtaataatagcggataaaatgctttatttaatgcactgaatacatagtttttatcgttcatattaataccctattgctctataaaatgcggctacaggaacttgtaaatttggaatactgctaaaacattggaattgggtattattgaccatcattattgaaaatgtgcctgcatgttgaggggcgttaccaacgtgagttaacgtgacgttgagacatttattcgggaatgggattggaaagttatttaaagcaccaggttcggcataagcattgcctttaactgatgctattccccacatttcaattaagcccgaaggtaatttttgccatccgacctgattcaggctagaggtgaaaaacgacatattaggcacttgattttcaccattccctatcgttatatttgttgaatcggataaaccaaggttctttataaatgcagctttatcaggaatgtctgcgccgttttggtcttttgccagtcgattattagcattatcatttacatcagaaacaagcttttgagttggagcgagtgtattactgttgcctatttggtctgtgagctgaataattcctttttctgttaatgaggcatcgcgagtttctgttgtgtttttttgttctaaggatttcttgaattgggtggtgagtttgtctatatccccattatccagaacatcttcgccagattgtgttgcgataaaattagcgacgacagtggatatggttgacgactgacgtaatgccttattcaatagttcaggggtaatatctgctgttggaaacccagtttgtaatttttgttctttttcatatgtttcttggggcattatatttgcattttcactaatagaaaaagccttaaaatcattcttttgactcatatatttttctccaattaatcagtgcattttataagcaatatagtgaatttttataaaaataatttttccctattcacgccagctatagtttagttagaaaaaagaataatggaatattcttataacttatagggttaactatttttatataattgttggtaatgaatatgttaattttttgtaattttaaatgtatctaaactatttgcatttaatatttgaaaatgatgtttattaattccatttatgatctaggggagttatgtggtataactgatttggtttaatattttaatgattattgatattgagtagcgacaaaataccagaatcaataaaatgataaagaccgggttctacctgaatcccgatctttttgttaattacgataatggtggaattgaccagtcaatttatggggctttcgaagtatcaacccgattaagtatcacccggtatttttttatttgcaatagataaaaattttgttttaatgtactaaatagtttttgttgttcataatttttttccaaatttaattaaataattattatgataaattaattttttaattaatatcctattgccctaaaataggtataaacaaaaggttggccgtcacctgaacctctataacatttgaattgactctgatttactacggatgccccgaatattcctgctgctctcgggtcccaatcattgtgagttaatgtgatgctaaaacatttatttgggaatggtattggaaagttattaagatatccgagatcaggtcttcctccggtagaaactcgtgcaattccccacatttcaattaaacctgagggtaatttttgccaaccattctgaaccaagtttgaggtgaagaatgacatatctgggatttgattaactccagtccccactgcccgttttgccgcttcatttaaccctaagtttttcacaaacgcatttttattggggatatctgagccgttttgcgttttttctagtctgttattggcgttatcatttatatcggagaccagcttctgagttgcggccagtgtattgctattgccaactacatttgtaagctgaacaatacctttctgtgttaatgaggcatcgggaattttctttgtaagtttttggtctagtgctttatttaattgtgtagtaagtttggttgtattaccgtcatccaaaacatcactgctagattctgtcgcaataaaatcagctacaacagaggctattgtggacgattgacgcaatgccttatttaataagtgagtgggaacattatctggtggaaacccagaatacaaactctgactttcttcgtatctttcttgactgactacattcgcattattgctaatagaaaacgctttaaaatcattcttatgattcatacatatattccttaagtaaatatacccgttatctttcaagttgcctctttgttggctgcactctctcaccccggtcacatagttatctatgctcccgggaattcgttcccttgccgtcgcgatgcatctcgaaatccatagggtataatattgttttgtaattaacatattgagttatagtataggtaatttatcgagattaatttcaagcatagtctacgccaaaaatggaataataagatttcattattaatcaattgattaattaattgtgtatggctgatgataataaatcgtttaatgtcttgtaatcgaaagtatatccaaaatgtttttattttttatgtatgtttcataaatataagggaatatttttatcaaataatggcatgaattatctgttaaaaaaataaaatgggaaaagggctgctatgcagcccatggttttaatcagcaatataaatttctgtaatatcagggcaatcctctttgtttactatagatagcctcactcctccgtctgatgaatgcacaacgagccatccttttgatccatatccagtgccaaccaaaatattatcgatcggaggcatttgtaaaggtaaaaatatacctgggctaccagtacgtaaatatatacatcttcctcgtatgtcctgactcagtaatatgctacttccactatctccactccttcctatttttcgccatccctgattagggcctttcttttgatatcgttcgtcggattctgaacgtgaatatgcccccacatctctggcttccagattgatgtcttcaatcagtgctttgccgttaattttcctgttattaggaaccgcattttttgccaatgtcacggtttctgataagccaagttcatttacagtaggtttgtttttggttgtataaatgctagtccaatcttcttcaaatccataattatcacgagccgagcgataagcaatacccccgtttttataatgcactttcaactgaaaagccggacaattcccagcgccattatagaagtgcacaacatgatcactaaatttcgcatgcagtaagtcatatgaccctgaatctacattccacgggacttggttatcaacagaatattttcctgttaatccgagcctaaatgctcccacatcgccagccgctaaattgatatctccagtcagcgatttaccattaattttcctactattcggcacagcatttttcgccagattgacggtttccaataagtcgagatttttcacaaactcatttttattgggaatatctgccccattttggtttttggctaatctattgttagcattatcattgacatcagaaacaagcttctgagttgcagcgagtgaatgactattaccaactacatcggtaagctgaacaatacctttctgtgttaatgaggcatcgggaacctttggtgccattttctgttccaatgcctgatttaattgagcggtaagtttatctatatttccatcatccagaacatcattgccagagtgtgtcgcgataaaattagcgactactgaggatattgtagatgattgacgtaatgccttatttaatatattagtggtaataccatcgggtgcaaacccagttttcaaattctgactttcttcatatttttcttggctcgctgcattagcattaatactaatagaaaaagccttaaaatcatttttaggactcatactatactccttagattaagtaatgaattttataaataacatattgaattattgtaaaattgattccttatttaatgcattgaatacatggttttatcgatcatgattttttgctatgttaattaaatgatcgtgacaattttatttttatcaaattagtatcctatcgccctaaaatacgcgccaacaggcgtaggatgattagtagggcttctataacatcggaactgactccgatctactacatgtactgaacatattccggagtcttgagggttataaccaccgttagctaacacaacatttaaacatgcgttcggaaaggggattgggaaattatttaaatatccggcctccatagaaccatagccttgaactagcacaaacccccacatttcaattaaacccgaaggtagtttttgccagccggtagaacctaggtttgcgttgaaaaacgacatatctggaacctgattaacgccagctcctatttcccgttttgcagcttcatttaaacctaagttttttataaacgtatttttatcaggaatatctgcgccgttttttgctttttccaatgcagagttggaaattttagttataattttttgttctaatgctctatttagctgggcgattagtttaacaatatccccatcatccagaacatcatcgccagattgtgttgcaataaagtcagcgacggcagaggctattgttgatgattgacgcaatgctttatttaatacatgaatagtaatatgttctggtgggaacccggtttttaaatcctgtctgttttcgtattcttgttgactcactatgttggcattattattaatagaaaacgctttaaaatcattcttgggactcatatacactttccttaaataaaataatgttctgttataattaacatgttaagttatagtataggtaatttatcgaggttgattctaattatagtctactccaaaaagaggagagtaagattctattataacttaaacgattgattatttatatatgactgatagcaataagttatttaacatattgttatcgaaagtatattcaagacgtttatatttcacgtatggaaattattttatcttatttcttttgggaaattttaaatgatttccacaagttttattaaaatacattatgtcaaagtggtaactacgaaaatactattgttttgtctattgattagattattatatttgttttataccctatggatttcaagatgcatcgcggcggcaagggagcgaatccccgggagcatataccctatggatttcaagatgcatcgcgacggcaagggagtgaatccctgggagcatagataactatgtgaccggggtgagcgagtgcagccaacaaagaggcaacttgaaggataacgggtatagataactatgtgaccggggtgagtgagtgcagccaacaaagaagcaacttgaaagatgacgggtatatgttatgttccataaatatagaggagtatacctatcaaataaggagagaagttatctcctaaaaaaataaaatgaaaaaagggctgccatgcagcccacaatgttaatcataaattatacctgaccggattaatacttcaaaagcatcggaaatcgaccggtcaaaaaagtcattatcatcactggagaaaagatcggggatagaatagtgcccggtcttgataattttattattctggtatttgtggccacttaatatctgaaaccattgaagtatcaacacggttcagtaataccacatacttcttccaggcaagcaataatgctttctctgcgtctgaggccatctcagtttcaatggcatattgtaataaagtgatagcttcattagcctgttgacgaagaatgacacgttgttgttctgcctgtttaatctggttggctttttgagcttcaatatccgttacccatttttcaccatcccacttatcaaaatcggtgcttggttgtttgaatgtcagtgtttctggtaattcacccggtttaatgatttccttctgttccccagtttgggtgttgtaagctattctccctcgatagtctggtaccatttgccagccggttaaatcaggtgaacgacaggcgatatatccctcttgggctttaggtggtgcgtctatgcaggaattggcaggaaggccgataccaacgggaaggtactcatcagaactgtttaaatattccagcgtaatcgcatcgtaattaaacacaacgatacttccggcactgatggcaatattatttttatccagtacagccttattcatcatgcaatcctcacaatgtaattaaatgccacatttcgtggacgtgtttctgttcccgttgaagcagcaatcgcattatccatatagccgtaaccaccagatcccatgccgatagcgatgcctattccgcgaggatcaatgccgtagttaatgttttggtagacactattgagaatacggcccgctgaacctaccccgtcggttccgccatttgagttggaccacatccggacaaccctgtgactatgtggagcaatatctgctagttgcccggataatagatatcggccaatatccaccccacgcccatcatcccagccccggataaattcaccccgtaaatcgggtaatctgccagtagggtaagcttgcgctaattgtggatataaagtttgatcgaagatcgctccattgcatttcacccacccatttggtggtatgtcagtcggccaaggaagtggtattcctaccgggatttcttcaagtaccaacgtgctcattatgctgccctcatcatatagttaaacgctaggttatgtggctttgatacccctatactcgttatctttcaagttgcctctttgttggctgcactcgctcaccccggtcacatagttatctatgctcccggggattcactcccttgccgtcgcgatgcatcttgaaatctttagggtatatcggtcatccgccactggggtaaactgctgctaattttggatataaagttttatcgaagattgctccattacatttcacccactatttggtgtatgtcagtcggctaaagaggtggtgcacctaccggaattagcttttccaataagcttcggtttttcacaagtacatttttattaggaatatctgcaacattttgtgattttttcaatgcgtaattggaaattttagttatgattttttgttctaactctctatttaattgaatgttgagtttaacgatatcactatcattgagaacactatcaccagattgtgtcatgataaaattatctacaacagagactgttgttgacgatcgacgtaataccttatttaataaatgcgtggggacattatctggtagaaatccagaatacaaactcaggattttttcgtatttttcttgatttactacattagcattattgctagtagataaatccttaaaataatttttgggactcatatactttcctcaaattagattatgtatttatagaccataccttgagttgttgtaaagatagtatccgttcatttataatttagttcagaaaaggaataatggaatgatttataacttaggttgttaactacttatatgtagttggtagtaataaatagtcaatgttttataattgaaaatataccaaagctattaatgtcttatttctgaaaattatatacccaagaaacttcaagatggatcgcgatggcaagggagtgaatccccgggagcatagataactatgtgaccggggtgagcgagtgcagccaacaaagaggcaacttgaaagatgacggctatatattaccacaactattaatctcgacggtttaattagaggttatatcatgattatgaagatttctttatgaaaggatgggtgttagctctggacagcaactgaaagattcttatatccataaataagaaattttatttatgatatatttttgtttttcttttgttaatattatgctttaaggatttatctgtatttttataaaaaaatcagactattattgttagatgatatttttgtagatgaactattattttattttgcttattcatttgaccatatttatagagatatcagctcattatatctttgggattaatgcttctatttttcggtatattgtgttgtctttgtgaataaatttattcttaagggagaaatatgtttaaaaaattagaacaagtcatctttgatacccgtgataacaaaagcattttctctcttatttctttggttatataccctatggatttcaagttgtatcgcgacggcaagggagtgaatccccgggcgcataggtaattatgtgaccggggtgagtgagtgcagccaacaaagaggcagcttgaaagataacgggtataaaaagaacaatgggataaataagatggtggctgaaaacagcaatcagcctgaattaaaacaaattatataaaacatgcttaattgattgctgtcattgtgctttttaccgtgggaaggacgggggatttgtatcatccgcgggaaattagattttcaaagcaactgttgtatctgtcagatgcagtagttttccatacccaatggatttcaagatgtatcgcgacggcaagggcgcgaatccccgggcgcatatagataacgatgtgaccggggtgagtgcgtgcagccaacaaagaggcagcttgaaagataacgggtatatttaacctaaacttaattaagggattatttatggggaaatcatcaaaccgtagtgcggaatttttctttactgggaaatatgatgatgatgatggtgggaataatattgttgctattggattgggaggggagatttatgccaaaggagggaatgatcatattaccgttggttcgctaggagcaacaatctatgccagttctggtgataagaccgtagatggtggtgccggatatttaaaaatagtgaatattggcggtgatctgaaggtacatggtgccgcgggttacgcaagtattgataaaaacggtaatggcaatatttcatttattggtgcggcgggtggtgtttctatggatcaccgagggagcagcggtaatctaaatttttctggggctgctgcttataataacctcagtcgtagaggtcaatccggtaatgtgacatttaaaggtattggtggttataacggattatggcacgaaactcatcagggggatttaaactttaatgccgcaggggcgggtaataaaattgaccgtacttggcatgaccgttatgaaggaagcaagggaaatgtgatatttgttggtggaggggcagcaaatagcatcagttcacgggtggaaagcggtaatattgagttcactggtgctggggttgataaccacattattcgtaaagggaaagaaggcaatattatctttcagggtgctggagcattaaatcgcattgaacgtttgcgagatagtaaagataaatatgaacagactcgcggtaatattgaatttgaaggtgccgggggttataacaaagtttattctgatatagctcatggtaatatccgtttctccggttccggtggttacaatgaaatatcaagaataggtgaggatagcgattcgtataataaagctttgggatacgctagcgcggagaaaattgtattaataacggcgaagatgggatcccagaagcctcagcaagtgactgctattaaatcaacgactgagtctaatacttatctctttgcatttgctgacggaaaatatactaagatcagcaaagttcagctaaaaaatgatcctaaaaccaataaattgagttattactccacttcatggcgtaaaaatggtaatcaactcaaaaatcttgctacggaaaatatctctttagagaatggatatgatgatataagcaatgatggtgattatcgtctttccaatttaatctttgaacatcatcaacccgttactattcagcatactgttgaagaagatttgcgagaaaatcagtgggtgacttatgccagcggaaccacggctaaagcagaagatatcaagctgattgatgcaaaaatgcatgggcgttcaatccattctaatggttcggtattggatgtttcggcggtgaaatcgaatcgtcgatcaaatgcttatgtctatgccaaatatgtcgagtcatataccaaagtggttgtggtggaattgaagaatgatgataaaaccggcgagctgaaatattatgccagtgcctggtataaagcgggcgaccatacccgagatttagccaatgaagatttttcacgtgcaaatggttatagctcgatggaggtagggggatattcactcactaaccttaaatatcaagtcgatactgtacgtcgtgtctctgagcatttagaacatattgaagaagatagtcttcaggaatgggtgaaatcatcttcgaatatcggtgatagctccggtgacgttaattttagcggtatgggtggcggaaaccttattaaatccagtgtaataaatggcaatgttaattttgaaggtgatgggattgctaacgtcattcttcatagttcgagatctggtaatacgcattttgaaggcgcaggtgctgccaatatcatcgaaaaaagtggcatagatggcaatctgacattccgtggtgcaggtttggcgaatgtccttgttcaccaaagccggaatggggaaatggatgtttacgctggtggtgcggcaaacgttctggtgcgtgtcggtgatggacggtatctggctcgtcttttggcgattggcaatatttcaatccaccaaggtaatggcgatagccgggtcgtcatgttggggggatataacacccatacccaaataggtaagggcagcgcgaattggttaggtgccggcggttttaatgtcatgacccaaaaaggtaaagggagtatttcttcgttacttttggggggtgctaatgtgttgaccaagcttggcggagataatctggtttccggcatgctcgggggagccaacattatcacgcatatttcgggtgataatgaaatatcagataccacagcaattgcgctgggcggtgccaatatcctgaccaaaaagggaagaggtgatgctgttgcgctgatgggcggtggtgcaaatgttctgactcacattggttatggaagcacgacgggggtgatgttgggtggtgccaatatcctgaccaaagtaggcaacggtgatactaccggcattatgcttgggattggtaatgtgctgactcatgtaggagatgatcagacattaggggtcatgggagcagcaggtaacatctttactaaagtgggagatggaactgcaattgcggccatgattggtgctggcaatatctttacccatgttggcaagggtgatgcatgggcgttgatggggggtctgggcaatatctttaccaaagtaggggatggtaaggcgctggcattgatgatagccgctggcaatgtgtttactcacgttgggaatgggatgagcgttgctttgatgttggctaaaggcaatatcgctaccaaagtgggtgatgggacgaccttggcagcaatgatcggtgaggccaatgtaatgacccatgtcggtaatggctcaacctttgccgcgatgatcgggcagggcaatatcctgacaaaagcgggcaatgatttggcgcttggtttgatggtgggtgaagctaatatctattcgcatgtaggtgatggcaccagcattggcttgcttgccggtaagttgaacgtgatgaccaaaatgggtgacgggacaacgctggcggcaatgtttggtgaagctaatatcatgacccattatggcgacggtttaactggcgtactggcactgggtaaagccaatattgtcaccaaagtgggtaagggttttatgggggttgtggcagcggccgaggctaacgttgtgactcatatgggagcatcaacgacggctgccgtgctattaggtaaaggcaatattctgacgaaagagggtagtgggacgacggtcggcctgcttatttccgatgtgggcaacatcatgacccacattggtgatggcacaaccgtgggtttcgctaaaggtaaagccaatatcatcactaaagtgggggaaggtacagggattaacgccgtctggggtgaggctaatatcctgacgcatgttggtaatggtgatcgttacaatttcgcgaaaggtaaagcgaatatcattaccaaagtgggcggaatgcgagaagtcacggtagttcagggcgatgctaacattatcacccatgttggtaacggtgatgattataccggcgcttggggcaaagctaatgtgattactaaggtaggcgatgggaataatgtagtacttgctaaagctgatgccaacattgtgactcaggtcgggaacggtgacagctttaatgccttgtggagtaaaggcaatatcgtcaccaaagtcggtgatggtatgcaggttaccgcggcaaagggtaaagctaatatcaccactacggtagggaatggtttaagcgtcactgcgacacatggcgacttgaatgtgaataccaaagtaggtgacggagtttcggtcaacgcggtgtggggtgaatataacgtcaataccaaagtgggaaatggtctcaatgttgcgatcatgaaaggcaaaggtaatgccaatattcatattggcgatggcctggggatcaatgcctcttatgcccgcaataatgtggcgattaaggtgggtaatggtgatttctacagtctttctattgcagagagcaacacacaaagtagtcatctctcttctctgtttgagaatattaaacaaactgtgttcaatgtagagggaagccagacgattaattatctgattcgtggtgatgaggcaaatacttctggcgtcaataaaggtagaggggcgattaatttaaccgaagtttccgccattgatggtttccagatggataaaattgatgaagtgagttcggatctggcgaacaacttgagtggcgcaataaccccggtagaaacgcctgatattaacgttattcagaatgacttgcagattggagataatgttggttcagctcaggatcaggcatcaccacacgctgatgcggttgtcagacatgcgaagcagaataaagccgcgcaaaatgcgttaagcgataaagaaaaagcggagataaatcatcagcgtctgcaacaagagaaagataaacagcttaaaacgatttcaaaatcacaaggccaactagaatcaaccaatcaggctgcgctgaataccaatggtcaagtgcaacgtgatgtaataagtgaagagtctaggggagtcacggaagaactattctccctgactcaaggtatgggtgcgcttaataactatggaaattatgatggtaaatcaggtgatgagtggcgtaatcggtttgctggtggatatctggataatatccagaataaattaaatgatgccaaacttactgcacagaaaaaattagctgatgcacagcagcactttattgataaacgagaaacagtaataacagccattaagaaatcagaagtaggtttcacgaaaagcgctgagaatctagatagtgcagacgacgatattgtagacgctgagaaaaaagcggagcagagaaaagaagaggcattattacagaaacaacgagccgataaagcggtgagtgacgccaataccgcgtatgacaaagcgaaacagcgtggtgaaagtgatagtacagcggcggaaaataaaacgatacaggcgcagaagaatgcaaaaagcgtgaaacaggctgataatgctaaaccggatcgcactggggcagcgggcagcggtttgtctggaaacgcttatataccgattgaggtggagaaatcgaagagtcatatcgatcctgcatcaaaagctgaacctgacggttggctcagtgaagatctggcactaacagcagaagatttggctgctttgaataatgcgcaacaagcagtcaatcggttacagcttaataaagggatgcgttcagaaaataccggtgcttcgatcatgtcaatgtttaccgaaacatcatccgatggcgcggtgaaatcaactttaaataaatccagagaattaatcagaaaagcgccgacgatttcaggtattgatctgcaaggattagggggaaataaccctagatctcattcttctgtacttaaaaaactagaacttatcttactgaagaaggataacaagcggtttattgattcgactaaaaggcgtcttggttcgataaataccgatttgcctagtaaggcgctggtggccgtgcgtgaggcttttaaccgtaccgttgagcagcccgatgaacagcatgtattgcagcttgaacaaacattggcgcattggcagcagcatgatcccaaggaattcactcaacgtagcaaactggtgaaaagcttacgttttgagatgggtgagctggttgctcacattcaggcccagagagctgagtcagccgggattttggggatcgctgtggcacctgagcaggttacgcagtttggacagcaggtatcgttcgatgggattggccgtgtggtgggcctgaaaggcgatattgcacaaagcgaaattaatcgtctcactgatttgcaaattaagccattaacccagactaactctgtagcagagcgggaagcacctaagaccgaaaacgaaagccttatcgttttcgtcagccgattacaacaagaagctatcccagaaggtaagccgctgattgaacgtgccagaaaactttggcttaccgggcaagtgacaaatgaaaaaaccaaagaattatttaaggatgctgttgcccagttgcaaacatatcctgaattgcacacgctggctcaacagctattgactgatgctaataaagagaaggccactggacaatatattgataacctgtttggccgccattttgattctgaactggcttatgaactggtgaaaacggcttcaccagaggcgaaaaataccgctgaacgaacaggtaacttcttggtagaagattttgagcggtggataggtgatctttatcctgaaggtgagaaacgtaacggggcaattgataaaaagatgaaatcttttgccgaggctattgataaggattttcgcccttggttcagccgggtacctgaggtgacaacattcttggacgatccgacttttgctaatttcaagaccatgatgaccaaggttgatgatggtttttctgtgattaaggtgccgtttctggcggtaaaaatggcgactacatcgggaatggggatggatgttgctgactggaagagaaaaggggattctttctatctgaacgtgatcaccaaagctcgttcaaccagtactgaactgactgccgggacgaatgcggaggatgttaagtacaaagtaaaaattacggaaaagcagaccaatgattatggcacggcgttgccctaccaacctgcgaataataaacatgacgactttttgtatggtagaaaggtcgcggcaggccggatcttgactcccggacgggaaacggcatttgagagtaatgcattggagcgaggccagtctgtggtaactggcgcgtctggctcgaccaatatcatggttcacctcaatgactatattgccagcaagcaacccgacttctcaaccgggcagagctatctcaatacgctgtcgtttttggtatttgatggtggtcactctgtcaacgaaagtctggtggtttatcaggcactacaagcaactgatgagataaaacgtaaacagatactgaacagctacacggctaattatcaggatctggcggatattgctggggaatcgggtaaggtgtgggtaaatcaggcgctggataacgcgtttaaagaaactcaagagttttatcagaagtatgcggtagtaaaaccacaaagccgccctgcggtggaagacttagaggggttatctggcacaaataaaggggtagaaccgacgattatcggcgatagtcatctgaaaaagcccgttgatggctggcaaaaggtggacgtaacgccgcagactgatggtcgtgaaacccgttttgatggtcagattattcttcagatggaagatgacccgatagctgccagagcagccgctaatctggcgggtaaacacccggattccagcgtggttattcaactcgacgccaacggtaaatatcgtgttgtttatggcgatctggctaaattatcaaataaattacgttggcaggttgtcggtcatggtcgtgatacgtcagagcagaataacattcgtctgagtggttacagtgctgatgaattggcgacgaaattaaagcagttttaccaggcggctaagctgggcaaacaggccatcagcaaacccgatcacatcagtttggtgggttgttcactgattagtgataataaacgggatggctttgcgcgtcgctttattactgaattggataaacaaggcattcgcagtgatgtgtcagcccgtagtagcgaagttgcggttgacgcaacaggccgtaaatttacccgtgacgaaaataaccaatgggttaacaactcgcctgataacaaaattgtattgagcttgaatgcggagaataaactgataacgcataccgaacaggttcgtcgtggtattgctgaaagcgatatcgacttcgctaaagttgggtacacgcaggctgattcggttaccaaaggggaaattgcggataacacagaaattttcattaagccacaaaagcgtgaaaaggttaataccagcgataactcgcatcgtcagctcagttactccggtaatatccaagtggatgtcggtgaaggagagtttacggcgcttaattggggaacctcgaacgtaggtattaaagtgggaaccggtggttttaaatcgctggctttcggtgacaacaatgtgatggttcacattggtcatggtgatagcaaacatagcgttgatataggcggctatcaggcgcttgaaggggcgcagatgtttattggtaaccgtaatgtcagtttcaatcaaggacgcagtaatgacttgattgtgatgatggataaatccatcccaacgccaccgttggtcaatccatttgatgatactgcccgtattgctgaggtattgaaaggtattgctcgttccggtgaaacgcaggattggttagcggcacaagatcagcaatggacaattgccggagcgaggaagtttgtgcgtgatatgtctggtttagaccaaaccagtagcgtggattacaaaacgttgcttgatttggactcacaacatgaacgtagcagccgtggtttgcagaatgacgccgaatcagcactgaataagaaatttaatcagtggttaggtgaaaatggcaatagcattgaaatgggcaaaatgagccgggcagataaattccgtcaggctaatcagaagctggccttcaactttgctgttggcgggcgtggcgctgatattcaggtgacgaccggcaactggaactttacgttcggtgacaatattcagtcaattttggataccaatctgggttcactgtttggtctgatgacccagcaatactcggcaacgggtatggcgaaaacaaccttcacctataccccgcaggatttaccgcgtcagcttcagaataagctgcttggccgattatcggaggtgggggcggataccactttggcggatatttttggtgtggattacaccgcggatggacgtattgtttcccgcacgggcaagcctgttgatggcgaggcgatgctaaaagagatgctggaagtgataaaggaatttagcggtgatcaactggcagccttcaccaacccggggaaattgctggatagtttggaggccggcatcaaagcgggagaagatggggtcaggacatttgcggaaagtcatggtttgaaagagaaagcgcccgataaaaatcaggaacaaggcgcggtggttagcaccaacggagatagcgctcaagcgaataacaaagcagaacgtgcatttggctttaattcgctgaatttgcctaacctgtttgcaacgatgtttagcaaagataaacaagcagagatgcaatcattagtgaccaatttgaaagagaatctaaccgcagatctgctcaatatgaagcaaaaaacctttgatttcctgcgtaacagtggtcatctgcaaggagatggcgatattaatgtgtcgttgggaaattataacttcaactggggtggtgacggtaaagatctcggtgcctatttgggcgataacaacaacttctggggtggtcgcggtgatgatgtttattactcactaggaacatccaatatctttacgggtggtgaaggcaatgatatgggcgttctcatggggcgcgaaaactggatgtttggcggcgatggtgatgataccgccgtggtagccggacgtattaaccatgtctttatgggcgaaggtaatgaccagacgtttgtctttggtgaaggcggccttattgatgcgggtaatgggcaggattacgtcgtgacttccggtaactataaccgggtggatactggggcaggtcaggactacgcggtgaccatcggcaataacaaccgggttgatttaggtgaaggcgatgactttgccagagtatttggcaatgacaaccggatcgatggttattccggcaatgatacgattaagctgatgggctaccatgcgatgattaatggcggagaaggtgatgatcacttgatagccgctgcgatttcgaagttcagccagtttaatggcggtgatggacaggatttgttagtgctgggcggttatcagaacagcttccagggtggagccggtgtcgatagctttgtggtcagcgcagaagtgattgataaccgggttaacgatatcaacgcagaagatatgatcttgtttaatggtgttgactggaaagacttatggttccagcgcagtggatatgatttggtgctgtcagtgaaccgtcatactcaggataacactgctcaggagatctttgaatcggtgggttcagttacctttaatgattactttaatggtcatcgtgccaaattagtgacgcagatgggggataaagacaaatcgggcgagtatgaatttacggcactttctgacaatgcggttgattcattgattcaggcaatgagtagtttttccccgacagtgggcgataatggttttattgagagtctgggcagtaaggcgagagctgctgttgccacggcatgggccgatgtaactcttggcaagggaaaatttgcctaattagctctctgtaaatcagcagaataattgtcgtagaaataaaaatagctcacagaaatgtgggctattttttgtttttttgtgaagttttagtgggtactatttctgagttttatttgttaatgttgaatttattataagaatacaagaagtaataatatttctgattattgtcatgaattatttatttagataacgtattgggatttttttgtggacatatgtaatgctattattgctgaggtagagtcggtttattttgttatattttctttaataacataatgattaaaataagtttattgcttgtttttacattgatgttatctttgtatttgaaagtttctatttaaataaatttttagcaaatgaaatctattgtttttttgtgaggagggtaaatgagtaataaaaatgattttaaggctttttctactaggttatgtccctcaattaaattatggccttaagaaataagcggatacaacctaatttcaccatagcgatataatttcttgctgtcttttcataacgggtggcgatgcgacgatgctctttgagtcgaccaaaacatctttctacaacatttcttcttcgatacgtttcatggtcgaatttaacccgtccatctgaccgcgctttttcatttgatttatagggaattatcacttttattccctgactttttaaccggttacgtaatgcgtggctggcataacctttatcagcaatcaccgcttttgaacgacgtttcataaaaccgtttttacgctgaatacccagaccatccagcaggcgcactgcatattgactttcatgacattgacctgcactgagtaccacattcagtggatagccttttccatcgaccgccagatggattttggagccataaccaccctgagagcgacccaggccatgattttcggtgacatcgggatgttttttttggcgcccgccgcacaatgtgccgcacgaatgttactgccatccagagatatagctgaccaatcaactaaaccttgttcatccagtattgacaataacttattgaaaatgaggttaatgagccccgattttgcccaccgattaaagcgattatagacggttttccaggaaccataacgttcgggtaaatcccgccagggggcaccggaacagagtatccaaaacatgccgttgataacccggcggtgttcaacataaggatgtcccgcccgttgagaatgttcagggggcaataaggggagcagtaactcccatgcttcatcaggaaggtcgtaacgagccataacatgttttttccgaaagtcagagccacatagattattctatctcagcctattgcgggacacaccctagtagtaatgcgaatgtagtcagccaagaaagatacgaagaaagtttgagtttgtattctgggtttccaccagataatgttcccactcacttattaaataaggcactacgccagtcatcgacaatagcctctgttgtggctaattttatgtccactcagtgtggaaaggatgtcttagataatggtgatttggcaacccttaataagacttttactgattcattagagtgtcatgcgaacaaaaatttccccggtagtttatcacttaatggttatcaacaactgccgggtggattaatacttcaatggggaagacataattttactccattagcgataaacaaagttattttaccaacgccttttaagcagggttgtctgaaggtttttatgtcacctgttggtgattggatatttccgatgtcagccgcacctaacgggacattgaatacttttaactcttgggttgcagcgcgaacgattaatgcttatgggactgaaatcaagttatctgctggtgatacttatgtatatggagattattttgcaatcgggttttaattagtatttcaaaatgaataataagccgaacttgtttcggcttattattcatttaaaggaaatataaaaatgttataaaatagaattgcattatatatttggttaattttttggatattttagtagcaagaaatatataaaatgatctcgggtatctattcccaatggattaataagaaaatatatctggaaaacaggtaaaataaatcgttataattgtccctgatgtaatcaaatgagataccgcagtgattgaaatctatagtgacgagtattggatgcagcaggccatcgaacgagcaataaaggcgtgggagcagggggaaatacctgttggtgctatattggttgctgataataaaatcatctcggaaggttggaatcagtctattatcgcgcatgatcccaccgctcatgctgaaattattgtgttacgcaaagggggagagcggttacgaaattatcgtttgataaataccaccttatacgtcaccctcgaaccttgcactatgtgcgctggtgctatgatacatagccgaatacagcggctggtttatggcgccagcgatatgaaaactggcgccgtaggttctttggttgatatattgcgccatcctggcatgaatcatcaaattgatattaccagtggtgtgcttgctgaggaatgttcgacgatgttgagcgcttttttcaaacaacgtcggcagcaacataaagcattaaaagccgccagaaaacagcaggaagaaaatcaagattcactcttttagtacccatatatggtactcgccgtttatcatctctgcgccttccaggattttttcaaagccggggaacttgttattccattcaccgagttggcgaatatattgtaaccggggggcatgttcatcaccaaaacgttctcccggtaggattattggtatacctggtggataaggaatgacacttacagccgatatgcgcccggcgagttcattaagtggtaaatgttcagtacggcctgccatatgatcaaggtgtgcttgtcgggggagtttcactatctcaggtaattggctaaatgatttcttttgctcaatatccatttcatattcttttatatacccaaatattttatccgaaatatctttgagccccatgttttcataatattcagggtattgcttcgcgagttttggcaaacattgtttaagtgaagtattagcgtcatagtgtttcttgaaattcaacaatacattgattaatgttccccatttacctttggtgacgccgatagaaaacaggcaaagaacaataaaatcggtggtacgcgccggcacaatgtcatgctggctgagataagcggaaagaatttcggctggaatgccattttccagcaattcatcattatcattcattcctgggcataaaataccaacttttgttggatctagcaggcaccattctgctgatagattggtaaatccatgccatttttctccctcttttaatacccaacaggaaggatccgttgctaattgttctctgtttgcttcatggaagggaattaatttaccgctatctgcgctaataatctctctggcattccagggtaagaaaaaccaatcatctttttgtttaaattgatgatgggtttttgctaatgtcagacggaagtctacggcttcattgatagcgttttgtatcagtctttgcccctgtgggccatccatcatggccgctgcaatttcattagtggcgataagcgaatatagcggtgaagttgtggagtgcatcatataagactcgttgaaacgggaatgttcaatgggttttttgccattgcggatatggatataggatgattgtgatagcgctgctaacatcttatgcgtggattgagtggcaaatattgtcgggccattattgtcaaaatcatttgggtcatcacgcattgagtaacgatgtttatacataggattaaaacgcgcataagcaaaccaggcttcatcaaaatgaatttgatcaacactttttgctagtaaatcttgtgcttgttctgcgtgataacatattccatcataagtacagttggtgatgaccgcataaacaggcttattgtctattgcgatcgcttttaatgggtgttgatcaatgagttgttggatatattctggttgaaattgatctctgggaatggggccaataataccatagcggttgcgttgaggaataagatatacgggcaaagccccagtcattattaaaccttgtccaatcgatttatggcaattgcgatcgcatataataatctctttctcaccaataacggcacccatgataatacggttagaacccgaagtgccgttaagcacgcaatagctttgatgggcaccaaaaatcgttgcggcatattcttctgattctttaatcgcacctgtatgatctagcagtgagccaagtatttttctttctattccaatatcacttcgaaataaattttccccaaagaaattaattaattctcttcctgccgctgtcttagtcagtgcaacaccgccttgatgtccaggagcagtccaggaatattctggtgattcttgagtgtattgcagtaatgcacgagtgaaaggcggtaataattgcgcataatatttcttaattagcgaactggcgcgagaggcgataaatccagccgtgtcttcaagcatccagacaaattcatctgccaatcccatgacttcaagtgtcagtgtgtcgatgctggaatattccgcggtcaacaataccggaatggttgtattgtgtttgcgtatctctttcagtaattctaacacttgtttatgagattcatagttattatctcctgaagtccaatcaacaaaaatacagcatagtgaggaatcagaagaaacggtagctatgccatcttggaatgtagccgccaggataacagcgaaattgttcttttttaatgcttctattaactcggtaaaggctcgaccattcgccgtcgtcggtctaaatacatggctgctgacgaccataattttgttttgttcgttaatgtctaaattaatcatgatttatcctttgagagagatagtgtcccgatgaatttagtatggttagctgaattagttgtcaaacataatataactgaggatatataatggctgtaattgactccttagagccttatatttgtttactttattttggttggttttcttggggaattaattttttccgattttctttggcctgtaaatatccgactaaactaagctgataacggcgaatattttcaatatagcgataagcttcatgtccacgggcatagccataggtggtatttgtataatattttttctggcttaatagtggaatccgttttttgacatcaagccagctatcgggatttcctttctgtgatgccgtcagtttgcgggcatctaacatatgtccataacccatattgtaagctgccagtgcaaaccagatgcgctcatctttagggatattttcaggtagtcgtttcattagattttgcagatagatcgcccctcctttaatactctcctccggatcaaggcgatcaacgacgcctaaccctttagccgtctggttggttaacatcatcaggccacgcacacccgtgggtgagattgcctgtgggtcccaatgagattcttgccaggcaatggcagcgagcagtttccaactgatatcaccggaatatttttcaaatagtggctgataggtaggcagaatattatcgatggcactgagaaaagagagtgtatcgaaataatcaaatgagtggacgtgaccaaagtatttctcctccaaccgtggcatgacatttttttccgttagctggctgaaaaaatccagcatggcagcataaaggctgtagtcgtcaatgcgttttaaataccatgtcagcgggttatcttcactcacatcaaaagcgacggccagattagggtgagtacgttgttgcaacgcgacattaatcgagtcacctaacgtataatccagtttaccttctgatacctgttccagtagttcgcgagtgttatattgcggtgtctcctcccattcgagttcaggaaaattctctttttctatctttttcaatgtgctggcatgagcagaaccagaagcgaccagcagtttaccttttaagtctttaaaagagcgagggcgtggagtccctttgcgataaatcagttgttgggatacagaatagtaagctggacctgtgcgggtttgatccagcctttcttgatgataagtcaggccagcggccagaaaatcagcctcacccttttccagatcatcaaataactgattgatattttttctaaatttgatttctaatttgacgccaaggtaattagcaaagcgttgtaccagctcgtaatcaaatccattggcttctttcttaccggtaagatggatcagaggtgagctaatggtgctgatccgtagctctcctctggtaatgatcctgttaatctgctcctgctgtttattcggccaactgatgttcagactaatgatggcggcagaaaaaagagcgataacaatgataacgaaataatttatttttatattattcaaatggttatctctgtataacgcagtgtggtgccaggtggaaacgcgctatattgttatggttaaatttccagtgattgagcattttgcggaacaaaaacgggctgtgcaacctaattgatactatttgcatgatttgacgacaggataattggcggtaataatcgtcacgcaaacggtttcgtcatgggtgacaatcctctataatggcttcatttccccttaggcatctattaagctttgcttctaagatgagagaattgattactatgaaaattctacgtggttcacctgctttatctgcatttcgtatcactaaactcctttctgtgtgccaagaacagcaacttccggtcaatgatatttatgcggaatatgttcattttgcagagattaatgcatctttgagtgatgttgattcagcaaagttacaacaattactaaaatatggaccttcgctggctgaacatgaaccccaaggtacattgctgttagtgacgcctcgtccgggaacgatttccccttggtcttccaaagcaaccgatattgctcacaattgtggcctgtcccaggttgtgcgtctggagcgtggcgtggcttattacatccaaagtggtgaaatgagtgatacacagtggcaaatattgtcatcattgctgcatgatcggatgatggaaacggtctttactcaattggaacaggcggaaaaattgttttctcgtcagcaaccggttccgttaaagcgcattgatattctgcaagcaggacgcagtgcgttagaaacggccaatattgaacttggattggcgttagcctcagatgaaattgattatctgatggatgctttccagaaattagggcgcaatccaacagatgttgaactttatatgtttgctcaggctaactcagaacattgtcgtcataaaatctttaatgctgattggattattgatagtcaggcgcagccaaaatcgctgttcaaaatgattaaaaacacctatgagcagacacctgattatgtcctgtcagcctataaagataatgccgctgtgatggagggatctgctgttggtcgtttctttgctagcgcggaaaacggttcatatgattaccatcaggagcaggctcatattctgatgaaagtggaaacgcataatcacccgacggcgatttctccttggccgggcgcatcgacaggttcggggggggaaattcgcgatgaaggggcgaccggtcgtggtgctaagccaaaagcgggtctggtgggattttcggtatccaatttgcggataccgggttttgaacagccgtgggaagaggattttggtaaaccagagcgtatcgttagtgctctggatatcatgatggaaggccctttagggggcgcggcatttaataatgaatttggtcgtccggcgttgttgggctatttccgtacctatgaagaaaaagtaaacagtcataacggtagcgaattacgtggttatcacaagccgatcatgctggctggtgggatcggtaatatccgtgatgaacatgtcaaaaagggtgaaatttctgttggcgcaaaattgattgtgcttggtggtccgtccatgaacattggattgggcggaggggccgcatcttctatggcatcggggcaatccgatgctgatctggattttgcttcggttcaacgcgataacccggaaatggagcgccgttgtcaggaggtgatcgatcgctgttggcagttaggcgaaaacaatccgattctgtttattcatgatgtgggtgctggtgggctttccaatgcgatgcctgagctggtcagtgatggtggtcgcggtggacgatttgagttacgtaaaattcttaacgatgagccgggaatgagcccgctggaagtctggtgtaacgaatcacaagagcgttatgtactggcggttgcgccggaacaactcccgctatttgaagagatttgtcggcgtgagcgtgcgccttatgccattatcggcgaggcaacggaagaacgtcatttgctgcttaatgatgaacactttgataaccagccaatcgatatgcctttggatgtactgttaggtaaaacgccaaaaatgttgcgtgatgtcactacattaaaagcgagcggtgagagccttgaacgccgggatatcgatctggcggaagctgttaagcgcatcatgcatttgccggcggtggcggaaaaaaccttcctgatcacgataggcgatcgctctgtcactggcatggtttctcgtgatcaaatggtgggtccgtggcagatcccagttgcggactgcgctgttaccaccgccagccttgatagctactatggcgaagcgatgtctatgggggaacgtgcgccggttgctttgctggattttgcggcttccgcccgaatggcggtcggtgaagcgctgaccaatatcgcttctgcttatattcaggatttaaaacgcattaaactttcagcaaactggatgtctgctgcgggtcacccaggtgaggatgccggtttgtatgcggcggttaaagcggtgggtgaggagctgtgtcctgcgctagggctgacaattccggtgggtaaagactccatgtcgatgaaaacccgttggcatgaccaaggtgaggagcgtgaaatgacggctcctttgtcactggtgattactgcttttgccagagtggaagatgtccgccgtacagtcacgccggagctttctaccgatgaagataatgcgttgttattaatcgatctggggcaaggaaaaaatacgctgggcggtaccgcattggcacaagtttaccgtctactgggtaataaaaccgcggatgtacgtagtgctgaacaattagcgggtttcttcaatgcaattcagcaactgattgcggaacaaaaattgctggcttatcacgaccgctctgatggtggtttactggtaaccttggctgaaatggcttttgccggccattgtggcattgaagctgatatcagtgtatttgatgaagatattctggctgggctctttacagaagagttgggtgctgtagttcagattcgagcatcggatagaggatttgttgaaagcattttggcagaacatggtctggccgattgcgtacattatttgggtaaagcccaagcaggtgatgattttgttatctttagtggtaatactgaagtctatcgccagaatcgcagtaccttgcgcttatggtgggcagaaaccacatggcaaatgcagcgtctgcgcgataacccggcgtgtgcagatcaggaacatcaggctaaacaggataatcaggatcctggactgaatgtaaaactgacctttgatatttcagaagatattgcagcgccttacatcttgcagcaggtaaggccgaaagtggctgtactgcgtgaacagggcgttaactcccatgttgaaatggccgcggcattccaccgagcaggctttgaggcgattgatgttcatatgagtgatttgttgtctggacgtattggattgagccaattccagacactggttgcctgtggtggtttctcgtatggtgacgtattgggggcaggtgaaggttgggcgaaatcaattctgtttaatgaacgtgtccgtgatcagtttgccgttttctttgcacgacctgatacgttagcgctgggtgtttgtaatggttgccagatgatgtctaacttgcgggaattgatcccgggtgcagaacattggccgcgttttgtacgtaaccgctcagagcgatttgaagcacgatttagtttggtggaaattactgacagcccgtcactgttcttacaggatatggtcggttctcgtataccgattgcggtttctcatggggaagggcaagtagaattccgtaatagacagcatcttgagatgcttgaaagcaaccagttagtggctttgcgttatgtgaataactatggtcaggttacggaaaactatcccgctaaccccaatggttcagtgaatggcattaccgcagtgactagccttgatggtcgagcaaccgtgatgatgccgcatccagaaagggtatctcgcacggtgaataactcttggcatccagatgagtggcgcgaagatggcccgtggatgcgaattttccgtaatgctcgtaaacagttagggtagtgctgcaatctaataaacaagaattgttaaattaaacagttgaaggatactttcaattgataccacaagggggagcaaaaattgctctcccttttggctaatggaatgtcagaaattcagtctctacgcaggcaatattggattagtgcttggcgtaaactctgtcgtgtatttaggaacagtgtagcaattacggtatggttagcttcatctattttgtagattgctcgcagttgcaatttggtatccacatagtcatggtggctggttaacccgatatcagccgtttcctcacatagcggagcacttttaggatatttaagaacacgagtttcaaaattgtataaaaaggtttccagaattttccaagatgcttctgcaccgatatgtctggttaaatagccaaaacgttcatgaagctggttttcaaatgtctgggtatattcaattttatttatgatcaccgtttgctaatttccgtaaattatttcgtagttcactagatgacacaattcgtccagattttatgtctttttcagcaaaagacagcagtcgcaacaatgccatttgttcttgttgcatttcaaactgagccggatcttgaaccacatataacggctccccgttttgggttactgtgactggctgcgatacatccatagaagccaattcttttttaaacgcggagactgtcgtaatccgcgaatttggggtttgatacataagtgtcctccgagtagaaactctgttgcttctgtaataatacatcatttgctgataaaggccatatatggggtaaatatggactattactgatccagatgtgagagttttatatcagcaaattcctaggcgtttagatgccgaattgctctattgtctcaattacccgacaaacacgtgttatgagtgtctcaaaaaggagacatttaattatttgattttaatctatttttattttcatgattttagatgtctttaattggcgacaaaaaataaattttcctcatgtcggaaaagaagctgtttggttgctgaaacgttacgtttaattttttccaaagtaaaaacagctagttataattaaaattttaatgttggcatggaatctgcattaagctggcacagttgctcattcagcttcttatgtcggcccacattaggtggagaaatgccacataaactatcgaatgatgccagagtaaggtgcctaccgtccaactcagtgatatcgctttcgagccttatcaaacatcgggcgacacgtggagtgaggcaccacctatgtctgactgtagataaacaacaggcataagtcaccctcactggcgggatagtagcaaaaactattatcccgtcgtcattgctcaggtgtttacctgcccctttgtactgtttgcgtcttacactgattttcagtcacagcaaaatttatcagccgatgggtttttctatcagccctttgtcggttagcattggtgtactgacaggttacgagatgatttccttgaaaaaatggcgtttatttccgcgctcattgcgccaattagttgtcatggccttctggctggtgttattgccgctgttggttttggcttatcaggcttatcaaagtcttgatcaactcagtgagcaagcggctgatataaaccgtaccacgctagcggatgcccgccgcagtgaggctatgacaggtattgcgttggagatggagcgtagctaccgccaatattgtgtgttaggggataagacgctggaaaacctctaccaaaggcaatatcagcaataccttaagatgctgaaagatcagatggctatacttgatgagcaacaacatattaagacgcttaatagtttattgtcgcaattgacaaaaatcgcttgtctcaatagtgaacctacccaacctgccgctcaattacttgagcagttctccaatgctaatagccagatggtacaggctacccgtgatattattttcagccggggagaacagttacagaaagatattgctgaaaaagggcaattttttggctggcagagtcttattttatttctactgagtgcgttattggtcgcgttatttactcgcatgattatcgggccggttaaagggattgaacgcatgattaaccgattgggagaagggcaatcattgggcgttcgcatagattcttttcaggggccgcgagaactccgttctttggcacaacggattatctggctcagtgaacgcttggcttggttggaatcacagcgccatgagtttttacgtcatatttctcatgaactgaaaacaccgctggcaagtatgcgggaagggacagaattactggctgatgaagtggcagggccattaacggctgatcagcaagaagtggttgctattcttgataatagtagtaaacatttacagcaattgatcgaacaattactggattataaccgtaaactggcagatggcccgacggagcaacagcaagtttctctacgggaaattgttaatgaggtagttttatcacacagtttacccgcgagatcgaaaaatattcagacggaaatccagcttgatgctgatattttatgggcagagcctacgctattaatgcgggttattgataatctctactctaatgcggtgcactatggtgccgaatccggtaatatctgggtttcaagtcgtcagattggtaaatatgttcaaattaatgttgctaatacaggtacgccaattcctgaatcagaacgcagtatgatttttgaaccgttctatcagggaacgctccagcgtaaaggtgcagtgaaaggcagcggtcttgggctaagtattgcgcaggattgtattaagcgtatggggggcgaactgatattaattcagagcgaatttgctgacgtatgttttcgtattaaattgccattagctgctgagaatgaataaataatgcataacaggtctacttaccgttttgtacgaaagacggatcggcagaatattgcagtacaacttggggaaaacgtatcggttgccagattgttattaccacgagtttcagttgggggttttagcatgatgctgctgatcttcgttgtttttttattggcgggttgcgttaaaaatccggttaataataatttagcgacagttacgcaaatggtaataccagagcaacgggtgacggattaccgtattgccgagtgtgggttaatgtgggatttagagacgccgccatcgattgagaatgcgctttactggctgcgactgatggattgttcagatcgcctgacatcagcgagagcacgtaatatggcgaaatacacgcttccggttacttgggatatggcttttaaacaaagtatcttacttaacagtgccgggcctacattgtctgagcgtcggaaaatgattgaaaacttcaacaaataccggttgaaattcccgaacccgttgcgagcgttattgcagttatggcgtgagcagcaagttcagcaaattgcagtggctgaggagcgggcaaaattccaaaaattacaggcagatacggataataaacttgatcgtctgcgtgaaagtcgcgcacggttggagtttgagctacagcaaacttctcgtaaactggaaaacctgacagatattgaacgtcagctctcttcccgtaaacaaaatcaggggagtgctggctcaggcaattcggataaacatgttgaaacgcccgagacgacggcattacctaacaaaaacagtacgccaaacagtacctctgaatcagataaaggagcagcaccatgacagcgcgtaaaccagcccatcttcttctggttgatgatgatcctggtttgttgaaattgttgggaatgcgtcttaccagtgaaggttttcgtgtcacaaccgcagaaagtggcggtgaagcgttgagattgctaactaaagaaaaaatcgatttggtgatcagtgacctgcgtatggatgaaatggatggtatggcactgttcgctgaaatccagaagcagcaaccgggtatgccagttatcattctaacggctcatggctcaattccagaggcagtagcggccactcaacagggtgtctttagttttctgactaaacccgttgatcgggatgcgctttataaagcgattgatggtgcattggcgttgaccacgcctgccagtgatgaacagtggcgggaacagatagttacccgcagtcctgctatgttgcgtttgttggagcaggcgcgaatggttgctcaatctgatgtcagtgtactgataaacggtcagagtggtaccgggaaggaagtgctagcccaggcaattcaccgtgccagtccacgggcgaaaaaaccatttatcgcgattaactgtggtgctttgccggaacaactccttgagtcagaactgtttggtcatgctaaaggtgcatttaccggtgcggtcagcagccgtgaagggttattccttgctgcgcaggggggaacgctgtttcttgatgaaatcggtgatatgccacaggctttgcaggttaaattgttgcgcgtattgcaggaacgtaaaatacgtccgctcggaagtaaccgtgatctggatattgatgtacggattatctcagcgactcaccgtgatttaccgaaggcaatggcaaaaaatgagtttcgcgaagatctctattaccgcctaaatgtggtgaacttgaaaattccagctttgaatggccgggttgaagatattcctttattggcgaatcatctgttgcgtgaatcagcgaaacgccataaaccttttgtccgtagtttctcagttgatgcgatgaaatgcctgatggcggcaagttggcctggcaatgtgcgtcagcttgttaatgtgatcgaacagtgtgttgcgctgactactgcgccggttattagtgaagccttggttacgcaggcactagaaggggaaaatacagcgttacccacttttgtagaagccagaaatcagtttgaactgaattatctgcgtaaattactgcaaatgaccaaagggaatgtgactcatgcggcgcgtatggcggggcgtaaccggactgaattctacaaattactggcgcgccatgaattggatgcgaatgattttaaagaataacttttctgctgctcaggaagtttttacactggtataaagattggtggcttgggagagccaaattttatgagccgtactcttaatattgcccttgcacagcttaattggatgattggcgacattgaaggcaactgtgaacgtatgttgcagacagtacaggaacaacagcaacaaaatgctgatttggtgatgttttctgaactggcaatatccggttattctccagaagatctattattccgagctgattttcatcagcgttgccgtgagcaattggcacgtttacaggctgccagttgtcaaattgctattttagttggtcatccttgggagcaggacggggagatttacaacgcactttccttattctggcaaggggagatcttggcccgttatttcaagcaacggttaccaaattatggtgttttcgatgagaaacgctattttaaagcgggcgatcaaagctgtgttgtgccatttaagggctacaatctcggcttattgatttgtgaagatttatggtttgatgagccgattgatgccttgaaacaggctggtgcagacttagttctttctatcaacgcttctccatatagccgtgaaaaaccttatatccgttatgaactgattagagaacattgccgacgtacagagttacccatgatttatcttaatcaggttgggggtcaggatgagctgattttcgacggctgttctaaagtttttaatgcaagtggtgaagtgactcatcggttagccgcatttaatgaacaaatccaacaatgctgctttaatgaattaaaaattgaacctatggttaatccggcacctgaattaccgccattgcagcaggtatatcaggcattagtcctttcagtgcatgattacgttcgcaaaaatggctttcaaggcgtgttattaggcttatctggaggaattgactctggcttaacgctggcaattgctgttgatgcattgggtaaagagcatgttcaggccgttatgatgccattccgctatacatctgaaatgagtatagaagatgctaaaaaacaggctgatatgttgggtgttgagtttaatgtggtgtcgatcgaaccggtgtttgatgcatttatggcacaatttgaacctctatttgccggtacggccaaagataccaccgaagagaatttacaggcgcgttgccgtgccgttattctgatggcgatgtctaacaaacgccatcgtctcgtgctgacgaccagtaataagagtgaatcagcggtggggtattccacattatatggtgatatggcgggtggttttaatgcgctgaaagatgtaccgaaaacattggtatttgcattagcaaaatatcgtaatactgtttcgccggcgatacctcaacgagtcattgatcgtccgccatcggcagaattggcacccggacagcttgatcaggacagtttaccgccttatgacattctggatgatattctggaaggttatgtggaacaggataagtcggttgatgggctggtggcggcagggtttgatgaacaaattgtacgtaaagttgttcgtttggttgatatcaacgaatataaacgtcgtcaagctccggtgggaccgcgtattacgctacgtaattttggtaaagacagacgctacccgattacctctggtttcggccgtaaaaactggtaacaacaggaaaacttcatgaaaaagattgatgcgattatcaaacctttcaaattagatgatgtgcgtgaagctctggcggaagtgggtatcaccggaatgacagtaacagaggtgaaaggttttgggcgccaaaaaggtcatacagagctgtatcgcggtgcagaatatatggtggattttctgccaaaagtgaaaatagaaattgtcgtgccagatgatattgtcgatacctgtgttgaaaccattatgcagacggcacagaccgggaaaatcggtgatggtaaaatatttgtatttgatgtagcacgtgttgtgcgtatccgcaccggtgagcaggatgaagaggcgatttaacttaatttgaattttttggggtggtgacaggcagataaaaaagccacccctataaagataagatggtagctgaggctaatagattaaacgctaaagcgaaattggatattggcatacagaatcaaaatattggctaatataaaagatattgagaatgcagtaaaaactctgtctctattgatgtggttaattaaataatcatatatatccgtcatctttcaagttgcctctttgttggctgtactctctcaccccagccacatagttaacccgaattctggataagaaattgacgagaagcctgttccaggagcaaagttttggtgtgcaccaaaaacagctccgaggggggaacaggctatggacaacttagttgaaattttctgtgatgtcgatgatttttgccgttttttcatccctcaatgggaacaattttgtctcgatagcgggcatcgtttacgccgccgacaaggtcatatgtatcccagtgaaatcatgaccattttgatcctttttcatatgtcgcattaccgtgattttaaacatttttatctagaacatatttggaaatatcaccataaggattttccaaccttgcttagctatcctcgttttgtcagtgtggctccttccgttttggtgccattatgcagctatctgactcaattaaaagggaaacccacaggcattgcttttattgattccacccgtttgagtgtctgccataacattcgcatccctcgacataaggtctttgcggggatagcaaagcgcggaaaaaattcaatgggctggttttacggtttcaaattacacctggttgtcaatcatcagggtgaaattctcgcgcttaaagtgactccgggtaatgtggatgatcgggaacctgttcgtgaattatcaaaagaattaacgggttctctttacggtgacaaaggttacctcagccaggaattggcggacgatttagctaaaaccgatgtcactttcatcacgaaaaaacggcgtaacatgaaagcgagtatgcaagctgagtgggataagataatgttaaaaaagcgttttatcattgaaacgattaatgggcaattaaaaactctttctcaaatagagcattcccgccaccgaagtataaaaggctttctgttgtgcgttttaggtggattgattgcttactgccttaaattgaagaagccatcactgaaagttttctactcagaagacgatttttcaatgacggattaagcagaattcgggttagttacctatgctcccggggattcgctcccttgccgtcgcgatgcatcttgaaatctattgggtataaatcaattgatttcaaacctccaagcctagccatataccgttttgacaaagaaatttatcttttgcaaatcgcgcatcatgattaataaatgataatattttctcaatcactgaatgtttttttaaattaattgattacctctaactttaataattattcttaatcataaatttattgtgagaatttaaggccatctttgaaaaaacaattaaaattgtattgttgtgtggtttctttcttgtcagataaagaaagagcctctcaactattttatgattcatttaaatttcttatcttttttaagctgaatagtaatgccttgtaaatttggcttaaaatatggaggtacatgtgactgattttcataactttgacgtttatttgtctcaaatcatgaattggcacttttcgcctgaaaccggatcgccgttttggcttgaaaaacgcaaaatattggatttcgatccattgcaagatatacgtactttctctgatttaaggttatttcccgatattgctgatgaacttcgggatgttccgactgaaagcttggtgcctcgtggtttgcagaatgcggccattgcgggggtatttgaaagtggagggacgacaggacgacccaaacgtgttgtcgtctttgaagagtggttagagcagttagtggcctggcgtttgagtgatatgaaagtcgttaatacgggggcaataaagaataccttggcgctggtcccttctggtcctcatgttatcggggcaataagccgtcttcgtgctcgtgctaatggtgggcatttcttcaccgtggatttagatccacgttgggttaaaaagatgatccaacaaggtgatcttgccgggatggaggcttactgcgagcatattctcgatcaggctgaagatattattaatagacaaaatattagttacctaattgtcacgccgccacttttagaacgaatggttaggagagcggcgttggtcagtcatttgaataagagtttggaccttattgcttggggtggaactcacatggacccagatacacaggcatttttgcaatcctcaattttccctgatgtcaaaataacagccagttatggcagtacaatgatactgggcgaatctaaatcaagagataatcaggattttgaagggtcacctatctttgacagctttgcccctaacgtcctttttgaagttatcgatccactgacgcaaaaaccggttccttttggggaacgaggtcgggttgtaatgaactacatcaacaagtttgctttatttccgaatatcttggaacgtgatacagcggtgaggatgccaagaatagatgattacccaggagtttccgttacgctggtgcgtcctgttgaggagatttctggtcatgcggtaatagaaggggtctattaatgctaatcgatagtgtgaagcctgacgtaaaaaccgcaatggagaacaaattgcaacaagtggaggctctcgcactgggagaatcctatgttacacgccggcgtgcggctgttatcaacgtgttagatgaagttgttggagaaactgcgatagcgcctcccgtttatatttgtgaagttgttcgcaagatgagaattgccccccgactgaggttggatgaaattcatgcaacaatgaagcaggcggcaaaaatttattccagtgagagtgtcgccgggctttctccggcagaatatgtgcaattgacacaccgtgtcattgggctgccagcgagtattatcgaaaggtcactgattgaaacttcagaagtgcttatgatgatgtctgagataatcaaagcatctatgccacatggcgctatttggcatgtggatgatagcagagttgcagaaggatgtgctttattcagccgacgagcggatgtgctggctgttctgactggtggtaatgggccgggagcgcatgctttgtggccgcaagctcttgcttttgggtatcgaattttaattaagccttctgttcgtgaaccattcaccgctcaacgattagtctcctcattgcaacaggctgggctcggaaactatgttgcgctcataccgacagatcatcaaggtgctgacgaaatggtttctgcggcagatctgtctattatttatggcgggcaagatatcgttaataaatatcattcgaatcctaaagttttaatccaaggaccggggcgttcgaaaattgtggtaggttcagatgtcaatattgatgaagcagtttcacttgttgcccgatcggtcagtgctcttggtggtaccgcatgtgtttctgccagcgcggtattaatagaaggggaccctgttgattttggtcaacgtttatcggaagcgtttgatcagatggatgctgaggagacatttccattagggtcatcgaataccacggctttattacagaaatcactttatcctgaaaaaaatgaagatcttcggttgtttggtgaacaaacatcatcaggatatatccttagaccttgcgttactgttgtcgataatccaatagatcctttaattcaacgcgaacttccatttccatgcgtcactgttgcaccttatgaccgtttgaagagttcacaaatgttatcagattcgttagttgttactgtattctcgaaaaaaccagaaattctgggtgccgttctgagtaatacaactatcagtaatgtttatgcaggagatattccgacaacctggatggcaccacttgtaccgcatgacggatatttgtcagaatttttgatgcatagccgaggggttcgtattcagaagaattggtttacttaaaatgataaagagaaatgtaacgatatcaatctatgctaaagacccgtgaccgaattgattcaaacttgaaagatgacaggtatatacaaaaaccgcgccataagtcattcatggcgcggttttttattatttagtgttaagttgaaaatttaaatcactttatgtggaccaaaacatgcatagtgaataaattgtttatctattcccatatccaaccactgtttagcgacatattacatatccaaaacaaagcctgtttgaaagttatcaaattccactttgatgctaacgttgcatttcatcatatttccttatgacttcattgcctgattgattaaaaaacatcataattgattttttttgtgatcatttcgtttagggtatatttcagactgataactcaattataggtaatagttgcttatggctaatgatttaaatgtggaacgaaccgggctggtttttactcttacggccggtaatctccctgtgaaaacttttgttgtggttgaatttacactgaatgaagtcttgtcaatgctattcagtttgcaagccacagtgacttgtgccaattcagatattgattttgcggatattttggatcaatacgccacattgaccgtttatcgtgatgggcagcctgagcgttatatcaccgggattgtgactcattttgtgcaggaaacaacgggccgttatcgtagttgttattacttgactctccacccttccttgtggcgtgccggattgcgggttaactctcgaatttttcagaataaatccgtcaccgatattattgataggctattgaaagaaaatggcgttcggcaattctcttgtctattgcgctatgaacatcccgtgcgggagttctgtgttcagtacgatgagagtgatttggcttttttacagcgtctgttagctgatgaagggatcttttattactattactttgatcaggataagggcgagccggcaatgatttttgtcgactcttataccaagaatggttctctttcactgccctacaacccagaacctgatgttacaggcaaccagtgttgcatcagccagtttcgttggggagaacgagtgggcattgctgaaatttcggtgagagattacacatttaaacatccccggtggctttcagattttcaattccatgaaaatcacaggtacatcggcaatcagcgttcggatttaaatagctactattactatgactttcccggacgttataaagatggaaatgggcagcgaataagtcaataccggttggaggcattgcgtaatgatgctttgcttggcagtgggcaaagtgacagttttgctcttttaccgggcatgtggtttacgcttaccgatcatccgaaagaaaaatttaatgcgccgtggcaaataatccaaattactcaccgcggtcatcaacctcaagcggatgaatcccattttggtagcagagggacgactttgacgaacggttttacctttggtagtcccaatttctccgtgaggctaaagaggtttattcgcatgtgaaatctgttgtaggaatgtcttttctgatgccaccttttacacatggcacaggaagtttgataggatagagaaaatgcttagccagtatcgttggtcaataaaaatggccgatctctctcatctgtcatccgaacaggctgaagctgccaggagatttgtcgatctcaagtttcaggtggatacgatggcaagagatcaccggatgacctgcatggcactatgggtggcggtgagtacggcccatctcacggtatgtgtttcttcaatagaatcattccttttctgccctgtgattctgaggttcatgagccggagatcctgtatgtgccgatagcacatacactgggatgcagttggcggtggtggcctgaccattatctatcggaagagaacgaagaaggaataaaattacacattttttcggattatgggattcgtagtaccagttatacttacatacctgaactaggcttgtttctgcccggtgaagggaaaaaccgggttaatttctgccgtcatcacaacattagcgctattccatcccatcattccgaaggctgacagaataaagctttatgtcaaagaggaagccgctggtagagacgttttggctgttctagataatcgctatgttcagaaggttaaccattatgcgtttgcactaccggtccttcaggcttatggagtcatcgtatcacgtaagtggcctagtgacttaccatcaacggatgatatccgggcttatgctagcacctctgttaacaacaagcttttttaccggccggtagtcgatctcgataaagtcagagtagcgttcactaagaagaaggagggggaagagttcatccgtaccacgctttttcatctcctcccagtccgtaaaaaatttacccatatcttcgtgttcatgctgatttttgtggtagcgatgactctgtgggatcacctcggtgaggggaatgtcgcgaatatgttgcttgcagtaggggcttttgctgtcggcagcatgtttgtcatgatggtaccggtttttcaggtaaggaaaaaatacttgactgatgaaagtcagtgacatagtgggtgtgcttcggaagatgtagtggagcaaaaatttcggacatctcacaagtctgctaatctgattaatatgaaagtgaggtattaacgtgaaactgaaacagccaagataccaatattcttctgaattgccctctcattgcttcccacgactcagcataagagagattaccagctgccccgggatagttccatcctgattaatttcgtagttccactcacactgaaccacaataggcatcgcagtgtggtaatacaaaatcacaccctcaacatcagaatatttttaagataatccctagatgtttttatgcgccgtgcagaggcacggtctttcagtgggtgcgaatctcgcccggtacccattagagcagtcgtggcggtaacaaagcatggtgtattaggaagattattttaatgataatgtattccactaaagaaaaatttttagaggaagagctggacgcaaacctggcaatcaagataatacttaacctattatttgctctaacatagggcatatttgagtcgcataatgctgaaaaggcaaaattatgaaaccagtaaccaacaataatttcctaagaaaaattaatataaaaggctacaaatctatctcagaatgtgatttacaaatgggatgtctaaatgtactcattggtgccaatggtgctgggaaatccaatttcatcagtttttttcgtctaatcaccgttgtacttgatcatcatttacaatctcttgttggcaaaatgggtggccccgacacattattgcattttggtcgtaaaaaaactgagtctatgagcactgagctttattttgatcacaatggttataagtttgaactggaacccacaaatgataaccgtatgatgttccaacatgaatcactctttttggacatcaaaggggattttaatattggtgctggacactttgaatctcagatcggtcagcatcataacattgaggattacgcattacttactatgctccgatggagggtttaccatttccatgatacgagtgataatgctagagttaaacaaactcatcgtattaatgataatgactatttacgggaagatggtgctaatttagcggcattcttatatcgtctgcaaaaaaatcatattctgcattacaaacgcattgtcaaaaccgttcaaatggttgcaccattttttggtgatttttacttgcggcccaccccggataatactgattacattcaactcgaatggacagagaaagagcaggatattccctttaaagcgagtgaattgtccgatggtactttacgatttattttattgactaccgtgttactgcaacccgaagattatatgccaagttcaattattattgatgaaccagagcttggacttcacccctatgctattaatgtactggctggtttgatcaaaaacgccagcagtaagcaccaactgattatttctacccagtcagtcgaactggtcaatcaatttgatgctgatgatttgattatcgttgacaaacaacaaggggaatctacctttaagcgtctgaatagtgactttctttcagaatggcttgaagactatagccttggtgaattatggaagaaaaatttactcggcgggaggccacagcgatgatccgtatcaatgtttttgtagaagggcaaacggaagaaacttttgtgcgggatgtgttagctccctattttgtagcacagcaaatctatctgacaccaatattagttcagacgagtaccagtcagaaaggcggtattacaagttatggtaaggtaaaatatcaaattactcgcttatgtcgacaagatcccggtgcattcgtcacaacattaattgactactatggcctgcctactgatttccctgattataatgaacaacaggataatgcagccaacgaacgggtagttaagctagagcaagctttcgctaatgatattgggcaaactaattttattcccaatctgttattacatgaatttgaagcactattgttttgccaacctgaaaaatttgcggattggcttgatgacaacgcccccatttcagtattacaaaccatcaaagctcaatttgatagccctgaagatattaataatagcccacaaactgcaccatctaagcgtattttggcgatagtacccaattaccataagaccttacacggcccactcatcgccggtgatattggattagatacaattcgttcccaatgcccacatttcaatcagtggttaaataagctaactaacctcagttttgtttagggatagctatttcaaaattacgtaaatttaagctcggctttttgtgttgaaaagtgtaggcaattaatcctgacacgacttccagcagaaagccgagaacactacgatgtcttgagtgtgctatttgagaaatatttttcaactgattcactacggtctctaccacaaaacatttttttaacatcaggttatcccatagtaataaagctttggctttcatatttttgcgtatatacccgtaatcattgaagatgcttgattttatccgaaatggagatcattatcctcgctatgaaaatattcattaccgatgaacaaaaagccgaacttgaacatctccatcacacctgccgtgataagagggagtgtgatcgcatcaaagcggtcctgctggcctctgaaggctggagttcagtgatgatcgctcaggccctgcgtcttcatgaaatgaccgttaaccgccatatcagtgattaccttaatcaaggtaaacttaaatctgataatggagggtctgatagtttgctttcccgagaacaaactgattttttaatcaatcacttatctcaacatcttttccatcacacccatgaaatcgtggcctatgttgctcagctctggaatattacctttagcattcccggcatgaataaatggctacaccgtcagggtttttcttataaaaaaccttgtggcgtccctcataaattcgacgcagaaaaacagcgacaatttattgaatattatgagaatcttaaagtcacagcgaaagacgaacccatcctttttcttgatgctgttcacccgactcaaggcaccaaactcagttatggctggatgcgaaaaggcgagaaaaaaaccgtcaaaacaacaggaagccggactcgcctgaatatattgggcgccctcaacctgaatgccattggtcgtacggtgttccaggaatatcagaccatcaacgactacaacatttgctgttttttcaatgaaataagaaagtcttatcctgactatcatcaaaaaattcaccttattgtggatggagcgggttacaacaaagctcatcttgtgaaggagtgggcttatgttagcaatattgagttacattaccttcctccctatagtccaaatttaaacccgatagaacgattatggaaggtcatgaatgaacaggttcgaaataaccgttatttcgcggataaacatgaatttcgagacaacgtcttcaaatttttcaccacaacgctaccggatatagcggactcgctgatgtctagaattaacgaccattttcaggtgctaaaaactgcatcttgaagtttcttgggtatattcgtcaccaacgtaactccttccacagccaggtcttcacacagggcttgtgaaagataacctttatctccatatccacttaaccttttcactcactgtttgaccggttgactatcattcgtattaccgggatcaatttgacctccaaaaactccctgcaatcatggataaccaagagaagtttaaagccatagaaccagcctgtactgctttttcctcgactcactacgtcatcaaagacccgacgcaagttatggcataccgctattctggtcgaatcaataaaagccatctttgctgtcttagccttgggcaatgaaaaggggtgaacgctctttttttcagtgcgagcattcgagtataactgactaatccggggaattctttctggaaataaggtgttacatactcaaagtaaaaggatttaagattctggtaatgactgatgtgaaataagataaggagcgtcatcacttagctgagagaaagaaaagacggtcgattaagctgacgtaatctatccttaatgaattgctgatgccagagaggcacaaagtcatcgacacgcagcagtaaagttcttttaaagtaaccatagcctgaagatatccacgattttgttttctttagcaaaaacttcatcattccttaggttctttgtgagggtgatttgggtgtatgtgtatgattgcccccaagtatgacagtaaaaaaacagtttttcctgttcggggcagtgtttcggtctgctatgattgattcaacgttttgcttgaaaggaataatggatatggcttttctggttaaagcagatcgtacaaccaaagaggtttttgccgaggacttcccggcaaataagggcatggagggcgagtttgatgttcaggatctcactaattttgtgggcgggtatcttgaaatggtaacgctgcggccaccgctaaacatcaacggaaaagaatactgctatatgctttgcgatgaagacggtaagcggaaagagtatccggtcaattacatcgcgtgcgagtatcttgtcggttcccatttagtaggaagtgactttgttgtaggtgatgttgtgttcctcgaacgacacgaaatttcatgaaccacgcttaactgaaggcgagtaaccattaagatatacccgccaccagcatcaatcccagaattgttcaatcggcacacgtccacagcgcagcaactgcacttcggctagccggttaagctcttcgcgcatatcagtcgttttccaaaaataccaagccgtagagggcgcttaacaacaacgtcattcgatggagtaacgccagatacaaagttgccgcaaacccaccggtttcgtacaccctctgcaaaagatgtacgaaagtaagtataatttatttcgtacatgcattatatttcgtacatgcattataattcggacatccattacgtacaggaattttcactatgtcacgagtttttgcctactgccgggtctccactctcgaacagaccaccgaaaatcagcgcagggaaattgaggcggctggttttgccatcagaccccagcgactgattgaggagcaaatcagcggttcggtggccgccagcgaacgtcccggttttgcccggttgcttgatcgtatggaaaatggcgacgtactgattgtcaccaaacttgaccgtctggggcgcaatgcgatggacgtacgaaagacagtagagctgctggcaaagtcagatattcgggttcactgcctggcgctgggcggagttgatcttaccagcccggcagggaaaatgaccatgcaggtcatttcggcggtggctgagttcgaacgtgatttgcttcttgaacgcactcattctggtattgccagagcaaaagtggcaggaaaacgcttcgggcgtccacctgcattaaatgaggaacagcagcaggcggtgatcattcgtctgaaagctggagacagcatcagtgctgttgcccgtcagttcagtacagctcggcaaaccattcacagaataaaagccgggatgattttataacttgaaggggcaaataattcgccctggtgtttcatacagcctgccccacgaggagtttcatggtatcgttaacaaaaaaacaaaccgcacagctttcagagatgggtcatgacgtgctactcaatatcattcatgacctgatacaggataataaacaggccaggaacgcactggtgaacgggtatctgttatcggcagcggaggtactcaaagccgtcgagaaggagtatgtccgacgcgccaaaagcaaacgtttttatgattactatgatgccgatgccttttttgacgagctgacacgcagtatagcgaccccccttgtgggtatcgcccacgcgctccccgagcaggtggaaagtctgagcgtaaaaatgatgcttgagttcgaaaaattcaccggtaacgtggacacctccagcggaagttggatggactactacaccattttgttggatgcgtggatgaaatcactgggagcgcaaaaaaacaacgatcctgcattcattgctaaaaaaatattcaccgttgttgaaagagaattttattttgggattgaaatctttaaaaaataccgcgccttactcggtacagatattttacgtataattcgtgacatgtattatcaaaaaaaactccaccgggaagctttgggtctcagcatgataatgaaagacttggattttctgacgatggcgtttaaaaacgatgagttttgccattccacccattattttgattatgccagattacttatggaagaactgcggtccgatgatgcactcgccgtattaaaaagtcagcggaatgacgatgaggatatcacagataatatcatatggaatgaactattcattcaggccctgattgaggaagggagaaaagaagaggccaaagcccactgtattacagcattcacctttcaaggtgatacccgtttttatcatctgtacacaaaagctgctgaaaaagatgtcgatcacagcccggcattcctgaaaatagcaaaagatacaggattagcgccatatgtctgttttgcatcagacattgaacggtatgacttaatcgacgcctgcattatgggcacgccaaaaaacaacctcgccgactcgctggcttatatcacccattcatatttacggacattatccagtaccctgtataaacacggctatgcgcatacggcgacccttttgcgccgctttttggtggaggacaacattcagaaatcaaaaagcaagtattacagctatgccgcctcagacatgaaaaaagccatcgattatggcgaaggtctggaggattgccctcagcttccggaaacagagggctacctcagaactctctacgaacaacataaacgtaaaaccgcactctggccgctgatgacagataaaatcaaaggattatccgtaggaaaggacggcctacgctacagcggagatgcctcatgacatcacaggaactgtatgaccacgcggtgtcactgctggcaaggcgggattacgcatccggtgagttgacacgggctctgagtaagatgacggaaaacagagagaatatcgacagggcgttgtcgagactgggtgagtgtggttatctggatgataaccgcctgattgataaacatgttcgaaaaaaacatggcccggccagaatcaaacaggagatcaggcaaaaaggtttttctcaggagttggtcgagcagatgctggagaaagtggatgtggactggtatgccatggcaagggacctgaaagtcagtaaatttggtgatgcggtggtatcagaagccaaagaaaaaaacaaacagattcgctacctccagtacaaggggttttcgatggacatgatatttgaggcgttaagctgatcatggttgtcagagccccatccaagacaaatgtcgtcatattgtagcttcgctcccattaccccgtgttgtgggtaggacacgatctccaacaagcaaatgaacgacttcgtttctggatttgagaacaatttgttcgtggccctgcgctatctggaacatcagcaacaaaaatgtggagccacaccgtcgtattcaggccaaactgtagcgtcttttgtcggagtaccgtccaggttcctctttactatgaacaagggaaaataaagcagccctgttagaatgggctgttagaactgaatcagtacaaataattaaagtaacttccgtattacatctcatttattcaattttaatcgctaatatattaactcatttaatatatctatcattataactaaacatgagaatagtcaaatccgagagatttattttatgaaaatgaatcgtaaggagctgacgtccaataggacgggctccacgataaacaaacgccataaggtctctaagataatgatgaattggttttttcagtcatattaagcacattcaataaacatgaatatcagaaccccataaattaaaaatagtttctgttcagttcactttattggctattatcaccctataacgtttttaatattaagttgaaaatttaaatcactttatgtggaccaaaacattcatagtgaataaattgtttatctatccccatatctaataactgcttcgcgacatattgcataaaggcgactgggccacagaaatagaaatgcattccttctgttttcaacgcctcattcagaaccgtcagatccataaaacctttgtgttgataatgaataccttgttgatcttcatcccttggttcgcgataccaaattgtgccagcaaaattcggcattgcttgcgcgatcgctgcgacttcatggctaaacgcgtgatgaccgccgtgttccgccgcatgtaaccaattaatcgggctattgtgattttgctggtggaggtgatacaacatgctcatcatgggagtcaggccaacccccgcagaaattaaagtaaccggcgtttctggtttaatatcaaggaaaaaatcaccgcgtggggcggtcagccagacggtatcgccttcttgcatcttatcgtgcatatggttggaaacgattccttgtggctcacgtttaatcgcaatccggtagctggagccgtttggtgctgccgttagtgaatactggcgaatttctcggttagcaaaactatcatcttgcagataaatacttagatattggccaggcttatagtccattactttcccaccatcttgtggtgcaaattcaaagctgcaaatgacctcactttttacttctttccggttgatacggaatgggcgtaaaccacgccagccaccatctgttaattcaccactatgatagatttgctcttcacgattgataaaaatatcagcgagcacaccgtaagcttttccccaggcgtccagaatttcatttcccggctggaacatttcattcaacgttgccagcaggtgagtaccgacaatctgataatgctctggttgaatattcaaactcgcgtgtttatgagcgatcttttccactgcgggtagtagtacctttaagttatcaatattggctgcataggcgcagatcgcattgaacaaggcttcacgttgatcgccgttaagctgatggctcatattaaagatgtttttcaactcaggattatgtttaaacatccgctcatagaaatgtgctgtcagttttgggccagtcgcggaaagtaggggaatagttgatttgacagttgcaatagtttggttatccagcatggtgaagctcctgaatttctttcaagtgggtaatgaaagttataacatgtaatttaaatgcaacttatacccttttggggactttgtaaatataacgtgtggtctttatggtgaaaaaaatgcccctaaaagatatttacactaaggaaaggactactttaggtcataaattccgacaaaatgaggaaaaatgtagcgtaattttcattacactatttagaaccgataccttgcttgtaatggatatgcaatcgtttgcgtaaaatattttgtcaagactatctcattcggtgaaaagggtttacactgtgtgccattcggccctttgggggtgttgtttgaagagaagttagctgagtcaggagaacccaatgttaaagcgtgaaatgaatattgctagttatgatcccgaactatggcaggcgatggagcaagaagttgttcgtcaggaagaacatatcgagttaattgcttctgaaaactataccagcccaagagttatgcaggcacagggctctcaacttactaacaaatatgctgaaggttatccgggtaaacgctactacggtggttgtgaatatgtagatgttgttgaacaattagctatcgatcgtgctaaggcactgtttggtgctgattatgccaacgttcagccacattctggttctcaggcgaatgcggcagtttatatggctttgctgcaaccgggcgatacgattctggggatgaatttggcacatggtggtcatttgactcacggctctccggttaacttctctggtaagttatacaacgttgtgccttatggtatcgatgaaagcggtaaaatcgattatgacgatatcgcggcacaagctgaaaaacaccagccaaaaatgattatcggtggtttctcggcttactccggtgtggttgattgggcaaaaatgcgtgaaattgcagacagcattggtgcttacctgttcgttgatatggcacacgttgctggcctaatcgccgcaggagtgtatcctaacccggttcctcatgctcacatcgttactaccacgacgcataaaacactggcgggtccacgtggtggtttgatcttggcaaaaggtggcgacgaagagttgtataaaaaactgaactcttctgtattccctggttgtcagggggggcctctgatgcatgtgattgcaggcaaagcggtggcattgaaagaagcaatggaaccagaattcaaagcgtatcaacatcaggttgctgataacgcgaaagcgatggttgaagtgtttttggctcgtggttacaaagtggtttctggtagtacagaaaatcacttgttcctgctggatctggttgataaaaacatcactggtaaagatgccgatgctgcattgggtcgtgcaaatatcacggtaaacaaaaatagcgtacctaatgatccgaagagcccatttgtgacttctggtgtgcgtattggtacacctgcgattacccgccgtggctttaaacaagccgaagcacgtgaattggctggctggatgtgtgatgtattggacaacatcaatgatgaagtgaccattgaaatgattaagcagaaagttttggctatttgcgcaaaatatccggtttacgcataaattaaaattttaatataccctatggatttcaagatgcatcgcgacggcaagggattgaatccctgggagcataggtaactatgtgactggggtgagcgagtgcagccaacaaagaggcaacttgaaagatgacgggtatagctcattacaaaacctgttccggctaacatcgtttgcttaagtgagatattgaggagtgatgcgtggattttccccccgggggatatccacttcaagataactctcaatatcttaatttcttgagctaatcaagttagttaagggcgggtttttttgcattttttaccagggaggactaatggttattcgatcgacgcgctggctggcgttagattacttcacatatttcttttcttacgggatatttttacctttctgggcaatctggctacagggtgaaggtatagagcacgatatgataggggttctattgggtgcaggcttgatttcccgttttttgggcagtttattaattgcacctacagttaaagatcccgcaaaacttatttttgcgctacgtatatcagcattgataacctttgttttcattgttggctttacattaggaaatcattgggcgtggctcctgttcgtcatggttggcttcaatctatttttttcgccgatgatgccactgagtgatgcgctggcgggaacatggcaaaagcaatttccttttgattacggcaagatacgggtttggggttcaattgcctttattatcagttcagcattaaccggggaattaatctctgtctggggacatcgtgccatcctcatcacgatattgtttagcgtcttctctacgctgttggtgacattgcttaggccctctatcatgccggttggtgaaaccaaatctgccaaagtggatgtcgtgtcatttaaacagttgttgtctgaaaaatcggtacgtcgattcctattatgtgtggctttattgcaaggtgcccacgcgggatattacagctttagtgcaatttactgggaaaacgcgggctattctgcctcggtagtcggttatctttggtcattgggcgtagtggctgaagtcattatttttactctgagtaatcaattatttcggcgctggagtgcccgtaatcttctgctgctttccggtatctgtggtgttgttcgttggggattgatgggaacatacacttcattgccggtgttaattatcgtccaaatcttgcattgtggtacgttcactgtctgtcatttggcagcgatgcgttttatcggtgcgagaaaggaaggggaaattgtgcgtttgcaagcggcctattctgcactggcaatggggggcggtatcgctgtcatgacggtaattgcaggatttatgtatgattatctgcacagtggaattttctggatgatggccttagttgcttttcctgctatcttcttgcgaccgcaggttaaagctcataattattaacaacataaatttagtttcttacaatatttttgtaagaaactaaatacctcaataatatttttatgagatatcatgtcgaataaattaacaataaaagatatcgctcgcttggctaatgtcagtaaatcaaccgtctcgcgagtattaaacaatgagaatagtgtcagcccacaagtacgtgaaagagttgaaacgattatccaacaaaataattttattccttctaaatcagcaagagcgatgcgagtaaagagtgacaaaatcattgctttaattgtgtcgcgtctgggatctttttcagaaaatttatcgataagtgccatgttacccctgttttaccagcatggttacgaccccattattatggaaagtaattttgatccacagcttttacaggaacatctacgtcagttggcattacgtcatgcagatggcattattttgttcggttttactggattgtcagaagagtctctcttcccttggcgtgacaaaatggtggtatttgctcgtgaatataccggtttttcttctgtatgttatgacgatattggtgctgtccgtttattgatgaatgaattctatcggcgggggcacagagagattagttttcttggtgtagatgattgtgataccacgacaggttttcttcgccatcaatcctatctggcttgttgtgaacagcaaggtttgcgcccgctttctgttcaatgtgatttaagctatcagagtgggtttcaacatattaataaggtattgagagagaaaacgacagctttaatctgtgcaaccgatagtttggcattaggtgcatataaatatttgcagcaaaatagtcgggaagatatacaaataggtagtattggtaatacacctttattgaattttttataccctaacacggtttctattgatttgggttatagtgaggctggtaaatatgcatctgatcaattaatttctcaaataaatcgtcaatacttcaaacaaaaagtaatcattccgagtaagttggcttaaaaataaaaaatatttccgtttcaatgtgatcttcaacccatttttgggaacgttcccatgacaagcataaccaaatgatattaggatgaaattagtttactaagcatgctaattagtaattgatactaacttatgatgactggctattatgaaaaacaaaataaattctaaagatatagaaaaactaattacattaatcggtggttgtgaaaatatagccagtgtaactcattgtattacccgattgaggtttatattagttgaaccagttaaagccaagccggatgagataaagaatttatcgatggttaaaggctgttttaccaatgctgggcaattccaggtagtgataggcacgaatgttggtgattattatcaggttttaaatcgttatcttgaccaatctgaattgaataaaaaagataaacagcaggttgagaagaaaaacatgaaatggcaagagcgtttcatttctaagtttgcagaaatattttttcctctcttaccagcattaattagcggtgggcttattctaggtttccgtaacattattggtgatattccttttagtgaaggcaaaactttagctcaaatatatcctatttggaaaacgatatatgattttttatggctgctaggagaggcaatatttttctatctgccagtgggtatttgttggtcggcggttaggatgatgggtggaacaccgatattgggtattatattgggagtaacactggtctctccacaattaatgaacgcttatcacatagggcaacaaatccctgatatatggaatttcggcttgttcacgattgggaaagtgggttatcaggcgcaggttattccgtcacttttggcgggtattactttggggtggattgaggttcagttaaagcgggtggttcctagttatctctatttggtgattgttccggtcgtttcgttaatattggcaacctttttagcacatagtcttattggaccatttggtcggttactgggtgatggggtagcttgggttgtgaaggcgttgatgaccggaagttttgctcctattggtgcagctttatttggattcttttacgcgccgttggtgattaccggcatacatcagaccacattagccatagatatgcagatggttcaaagtataggtggaacaccgatctggcctattattgcattatccaatattgctcagggatcggcggttgttggtattattttagtcagtaagaagcataatgaacgtgaattatccgtacctgcggctatctccgcctatttgggtgtgactgagccggcaatgtacggtattaacattaaatatcgattccctatgctctgtgccatgattggctccggtttagctgggttgatttgtgggttgagtggtgtattggcaaacggtattggtgtgggtggtctgccaggtattctttcgatcaaaccgcaattttggctaatttacgcattagctatgtttgtcgccatcattgttccgttgattctcacgactgttgtttatcgcaggaagaatatggccggtatgttagcggttgaataatgcggctaaatcttcacaagtaacagatataaaaataaccatgtggttattcaattcatggttatttaattcaggaaatatattgataaggtgtttttgatggacaaaatcattccgtggtggttacaaggtgtcatctatcagatatatcctaagagtttccaggatacgacgggtagcggaacgggcgatcttaacggcattacttaccggcttgattatttgaagaaactgggcgtagacgctatttgggtgacgcctttttacctctcaccacaggtagataatggttatgatgtcgctgattattatgcgattgatccggcttacggctcaatggatgattttaagcgtttggttgatgaggcacatcaacgtgatatccgtatcatcgtggatattgttttcaaccatacatcgactcaacatccgtggtttaaacaagcacaggatattgatagcccttatcggcaatattacatttggcgggatggggtacctggaaccccgcctaataattggttgtcgaaatttggtggcaatgcttgggcgtggcatgaagcaagccaacagtattatttgcacctgtttgctgttgagcaggctgatctaaattgggaacatgagccagtacgggctgaattgaaaaagatttgtgaattctgggctggccttggtgttgatggcttccgtctggatgtcattaacttggtttctaaacagcaagacttccctgagtcaactcagggggatgggcgtcagttctacaccgatggcccgcgtattcatgaatttctgcaagaaatgaacagagaggtattccagcctgccggagtgatgacggttggggaaatgtcttctacttcactggaacattgtcatcgctattcttcattggatggtgaagagttgtcgatggtttttgcttttcatcacttaaaagtcgattaccccaatggtgagaaatgggttgcagcgccacctgattttattgaattgaagaaaatttttgccaagtggcagcaaggtatgtacgaacgggcatggaatgcgctgttctggtgtaatcacgatcaaccgcgtattgtttcacgctttggcggtgaaggtgtttggcgggtgccgtccgctaaaatgttagcaatggtactgcatggtatgcagggaaccccttatatctatcaaggagaagagctggggatgactaatcctcacttttctcatattgaagagtaccgggatatagaaagtttaaatatttatcaagagaagattgagcagggcaatgataaacagcaaatcttatcggtcttagcgaagaaatctcgtgataatgggcgaacgccaatgcagtgggatacgactgctaatgcagggtttactcaaggagagccgtggatagcgctgaatagtgattatcaggatgtgaatgctgaaaatgcgatgcaggatgatgattcagttttccattgttatgcacgtttaatcaagctgcgtaaggaatatcctgtattgacttatggcagctatgaagacttattaccatctcatccttctctttggtgctatgtgcgtcgttgggaaaatcagacgttgttggttattgctaatctcagtgttgaagtgcagaaatggtcgctggacgcttctttatccgattgctcatgggttaaattgatggggaactatcctgaaaaccatgtacctgcaaaagatatgcagctacagccttatgaagccgtttactggttagcggagtaacaacggtctttgttgttagttaaatgaatcgtaaggtagaccgcgttttttgcggtctacctaaattaccatccgtcaattcttatttaggatttactggaattaacgtttcaatgcttctgataattcatcacgcatttcagccaaaatatctttaacaacgcgtggattacctgcaacaatgttgccggaatgaatataattatgaccgccaacgaaatcagttacgataccgccagattcacgaactaacagttcgccacccataaaatcccacggttttaggccaatttcaaagtaaccatccacccgaccagccgcaacataagccagatccagtgcggcggagcctgtacgacggaagtcagcacaacgaacaaataatttacctaaagtattaataaaaacagtggaatgatgttttgctttaaatgggaaacctgttgccagaatggtgccatccagatcacgggcattggtaccacgtagacggtagccattcaactgtgccccttgacctcgggttgtggtgaaaagctcattacgcattgggtcataaacaactgcaacttcagtacggcctttaatgcgtaccgcaatagagacggcgaagtgagggaggcgtttgataaagttagtcgtgccatccagtggatcgattacccattgaatatcagcctcttcgcctaaaagctcgccactctcttcggtaataatcgagtgtttaggataagatttgcgaataacgtcgataatgagtgcttctgcggctttgtcaacattggtaacaaaatcgttactgcctttttggctagcttcaaccgcatcgggagtttcataatttttggcaattaggttgccggctttacgcgctgcgcgtatggcgatagtcagcatcggatgcatgggatatcttccaccaggatgttaaagaacgggtaattaatcggcgcgtagtatagcagtaattcggaaaaatgactaatgctgtgttaagatatttgattcttataactatccagactattcagaagttgtcatgttagaaaatatccgcattatcctggttgaaacttcccacaccggaaatatggggtcaaccgcccgggcaatgaaaacaatgggattaaccaatctttatctggttaatcctttagttcagccagactctcatgcgattgcactttctgcgggtgctagtgatgttattggtcatgcgacgattgtcgatagtttggataaagcgctggcgggttgcggcttggtgattgggaccagcgcccgttcaagaacgttatcatggccgatggttgaacctcgtgaatgtggtgaacgtagtgttcaacaagctgaacatgcgtcggttgccattgtttttggccgtgagcgggtagggttgaccaatgaagaattgcagaagtgccattatcacctgaatatcccaactaacccggagtacggttcattaaatctggcaatggcggttcagcttgtcagttatgaaatccgtatggcctatttggcgcgtcaggataaaactgagcaaaaaactgatgaagtggaatatccattagctgatgatatggaacgcttttatcatcatcttgaatgtgtgttaaatgattcgggtttcattagaaaagcacacccaggtcaaataatgaatagattgagacgcctttttacccgtgcccggcctgaaatgcaggaactgaatattctgcgtggcatcttgtcctccgttgaaaaatgggcgaagaaatagttgagtaaattactaggttaaatagttgactaaaatactcaggaatgacacaatttcttcatatttcaccacggggtaattcatttatgagattgacatctaaagggcgttatgcagtaactgccatgcttgatgtggcgttacactcacaagaaggtccggtaccattggccgacatttctgaacgtcagggtatttccctctcctatcttgaacagttattttctcgcctgcgcaaaaatggtctggtttcaagtgtccgtggtccgggtggtggttacttattgggcaaagatgccagtgaaattgttgttgccgaagtgattttcgcagttgatgaatcagtagatgctacccgttgtcagggtagagaagggtgtcagggcggtgatcgctgtctgactcatgctttatggcgcgatttaagtgatcgtattaccggtttcctgagcagtatcagtttagaagaattggtcaataaccaagaagtattggatgttgctggtcgccaggataacgataaacgccgtgcacctaacggcagagcacaagaaacaattaatgtcaatctgcgcccataagcagaacttgtgatgaattgaagtattagaagtagggagcatgtgaccaatgaaattacccatttatttagattactcagcaacgacaccggttgatccgcgtgttgctgaaaagatgatgaactatctgaccagggacgggatatttggtaatcccgcttctcgttcacatcgttttggctggcaggctgaggaagcggttgatattgcccgtaatcagattgctgatttagtgggtgcggatccgcgagaaattgtttttacttctggcgcaacggaatctgacaatcttgccattaaaggggcggctaatttttaccagaaaaagggcaaacacatcatcaccagcaaaaccgaacataaagcggtgctggatacttgccgtcaattggaacgtgaagggtttgaagttacctatttggcacctcaaagcaacgggttgattgatttaaacgatctggaagctgcggtgcgtgatgacaccattctgatttctatcatgcatgttaacaatgaaattggcgtggtacaggatattgctgctatcggtgaaatgtgccgtagtcgcggtatcgttttccatgttgatgctactcagagcgtaggcaagctgccaattgacttaaccaaattgaaagtcgatctgatgtctttctccgcccataaaatttacgggccgatggggattggcgcactgtacgttcgccgtaaaccccgcattcgtattgaagcacaacaacatggtggcggtcatgaacgtgggatgcgttctggtactttgcctgttcatcagattgtgggtatgggtgaagcttaccgtattgccaagcaggaaatggagagtgaatctcagcgtctgcgtggtctgcggttgcgtctgtggcaggggatcaaagatattgaagaggtcttccttaacggggatttagagcacggtgcgccgcatattctgaatgtcagcttcaactatgttgaaggtgaatcactgatgatgtcattaaaagatctggcggtttcttcgggttctgcatgtacttctgccagcttggagccttcctacgtattgcgtgcgttgggaatgaatgacgaactggctcacagctctatccgtttctctttagggcgctttacgacagaagaagagatcgactacgccattgaattgattcacaaatctattggccgcctgcgtgaactttctccgctgtgggaaatgtttagacaaggtgtggatctaaatagtatcgaatggtctcatcattaatcagacggtttcaggagtaataacatggcttacagcgaaaaagtaattgatcactatgaaaatccacgtaacgtcggttctttcgatagtgaagatccaatggttggcagcggcatggttggtgcccctgcgtgtggtgatgtgatgaaactgcaaatcaaagtcaataatgaaggcattattgaagatgcgcgtttcaaaacttacggttgcggttctgcgattgcttccagctctttagttactgaatggatgaagggcaaatctctggagcaggcagaagcgattaaaaatactgaaattgccgatgaattagaattgccgccagtgaaaatccactgttctattctggctgaagatgcgattaaagcagcgattgcggattacaaaagtaaacgccagggcagataattgcccttgataataacaaaatagaaaaaaatttggtggatacgggatacgggttgttacataccatccggtatccgcctttgctggttttaataagtgaggttgttgtatgtcaatttcccttacagaaagtgccgcacaacgcgtttcgtcattcctgagtcaccgtggaaaaggtgttggtttgcgtctgggcgtcagaacatcaggctgctcaggtatggcctatctgcttgaatttgccgatatgattaacgaagatgacactgtatttgaagataagggtgtcaaagttatcgtagatggcaagagcatggtctatctcgatggtacggaattggattttgttaaagagggccttaacgaaggctttaaattcaacaacccaaatgtttccagcgaatgtggttgtggagagagttttaacgtttaattccgtttttcggccaaatccagagtaagtttagattatggactatttcactttatttgggctgccggctcgttatactgttgatcgagaacaactggcaagctgttatcaagaattgcagcgtcagtttcatccggatcgctttgcgagtcagccagagcgtgaaaaaacgctggcattgcagcaggcagtgactatcaatgacggttatcaaacgcttaaacatccactgaaacgcgctgaatatatgctctctctgcatggttttgatttagccaatgaacagcacaccatgaatgacaatgctttcctgatggaacagcttatgttgcgggaagaattggaatgtattgcggacaaagctaatccagaagtggcattggctgatttcgctgcgcgcctgaatgggatgattaaaacccgtagtcagctaatggtgcagcaattggatgaacagcagtgggaacaagcagccgatacggtgcgtaaattacgttttttggataaattgcaacagcaggttgagcaactagaagaacgtttactggacgacttttaaggaaggcgtatatggctttattacaaattagcgagccgggtttatccgctgcaccacatcaacgtcgtttagctgtcggtattgatttaggcacgacacattcattagttgccactgttcgcagtgggcaagcggaaacattgatggatagtgaagagcgttacctgcttccttcggttgttcgctaccatgaaaagggtcctgaaattggttggctggcccgtcaacaggctgcgtatgatcctgcgaataccatcagttcagtaaaacgtatgatgggacgctctctggctgacattcagcaacgttatccaaatcttccttatcaatttcaagcgagtgaaaacgggttaccgttaattaacaccgcaacgggtttggtcgatcccattcaggtttcctcggatattcttaaatcgctggtgcagcgtgcagaagaaacactggatggtaagcttgatggtgttgtgatcactgttccggcctactttgatgatgcacagcgtcagggaacaaaagatgcggcgcgtttagccgggttacatgttttgcgcttacttaatgaaccgactgcggctgcgattgcttatggactggattctggtcaggaaggtgtgatcgccgtttatgatttaggtggcggaacatttgacgtttctattctccggctaagccgcggtgtctttgaggtgttggcaacgggtggtgatacagcccttggcggtgatgatttcgatttaatactggctgactggatccgtgaacaagcggggattggcagtcgagatgaccatagtttgcaacgccagctactggatatggctactcaggtaaaaatcgccttgagtgatgctgatattgcagagataaacattgctggctggcaaggtaaaatcacccgttgcgaatttgaagccctgataaccccgttgataaaacggactttactggcaagtcgccgggcattgaaagatgcagaagtctctgcggatgaggttctacaggtggttatggtgggtggttcgacccgtgtgccgttggttcgtcatagggttggcgaattttttggccgcgaaccgctgacttccattgatccagataaagtggtggctgtgggtgcttcgattcaggcggatattctggtgggtaacaagccagatagcgacatgctgctgttggatgtgattccgctttcacttgggctggaaacgatggggggcttggttgaaaaaattatcccgcgtaacacgaccattccggttgccaaagcgcaggaattcaccaccttcaaagacggccagagtgcaatgagtattcatgtggtgcaaggggaaagagaattggtaagtgattgccgttcgctggcccgttttaccctacgtggtattccgccattaccggctggtggggcccatatccgggtcactttccaggtagatgctgatggcttgttgaatgtcagtgcgctggagaaatccactggtgtcgaagcttttattcaggtgaagccttcctatggcttatctgatgaagaaattgctcgtatgataaaagattctatggcaaatgctcaggaagatatcaatgcacgccaactggcagaacaaaaagttgaagcggcgcgggtactggaaagtgtcaccagcgcgttagaaaaagatgccgatctactgaatgaacaagaacaggcggcaattgatgctgccgtagaaacacttataacaagcgttcagggcaatgatcctgaaattattgaaaacgcgattaaacaactggataagcaaacgcaggaattcgctgcacgtcggatggattcatctattcgtcgagcgttggcgggccattctgtggacgagatttaattatgccgaaaattgtatttttacctcataacgatctttgccctgatggtgcagttctggaagccaaagagggggaatccattctgaatgttgcattgcgtaatgggattgaaattgagcatgcttgtgaaaaatcctgtgcttgcacaacttgccattgcatcgttcgtgaaggtttcgattcactggaagagagttctgaactggaagatgacatgctggataaagcttgggggctggaaccagaaagtcgtctgagttgtcaggctaaagtttctgacgaagatttggtggtagaaattccaaaatacaccattaaccatgcccgtgagcactgattggcaggagaaaaataaatgagcctgaaatggtctaacagccgtgaaatcggtgaagcgctatatgacaaatttccagaggtagatccaaaaaccgttcgctttactgatatgcatcagtggatttgcgagctggacgattttgatgatgtagctgagaaatccaatgaaaagattttagaatcgattctgctcgtttggttggatgagtttgaataacaaatagcattaatttgttatttatctgtcatcgttttaagttaggctgctcttcaatgaaaaactggctttggccggtttttttgtagggtgaatatctggcaggcgaagaattatgtaggtaatacccaatggatttcaagatggatcgcgacggcaagggaacgaatccccgggagcataggtaacgatgtggccggggtgagcgagtgcagccaacaaagaggcaacttgaaagataacgggtatagaagcttgaataagctcctcactgccatcaagcggtaataataagaggtgagaaaagaatgactaaacaaatcatgccaataacactgtcttatgaaccagcagcagcttgctggggtgaaaaagcgctgattagttccagtgagcaaggggtgatggttcacctggttggtaaaggtaaattaggggcagtgcaacgtgctggacgtaaaattgacgggcagggaattcgtcatgtggctctggtgggtgaaggttgggatttagagaaaagttgggctttctggcaaggcttccgtgcgccgaaaggtaatcgttctattgaatggcctcaattacctgcggctgaaaaacaggaattggaaagcagaattaaaattattgattgggtgcgtgacaccatcaacatgtcagcggaagagcttgggccggaacaattggcgaagcgtgcgattgacctgatgtgtggtatggcttgtgaatcagtaagttatcgcattattaaaggcgaagatttacgtgagcagggttatacgggtattcacaccgttggccgtggttcttcgcgtgatcctattttgttggcgttagattacaacccaactggcaacccgcaagcgccggtgtttgcctgtctggtaggtaaaggcgtcacatttgatactggcggctacagcctgaaacaatcttcctttatggattccatgaaatcggatatggggggagccgcaactctgacaggtgcattggcgctggcaatcagtcgtggcttgaaacagcgagttaaactgttcctctgcatagcggataacatggtcagtggtaacgcctttaaactgggtgatgttattcattaccgtaatggcaaatctgttgaagtgatgaatacggatgcggaaggtcgtctggtgctggctgatggtttaattgatgccagcaaagagaaagcgaaattaatcattgatgcggcaaccttgactggtgcagcgaaaacggctgtgggtaatgactaccactctgtactcagctttgatgacaaactggcggatgatctgttgacggcggctgcatccgagaatgaactgttctggcgtttaccattagctgaattccatcgtagccaactgccctcgaattttgctgatttgaacaacgttgctgcgtcaccgcatactgcgggtgccagtaccgcggcggctttcctgtctcactttgtggaagaataccaaaaaggttggattcacattgattgctcggcaacttatcgtaaatctgcggtagaacattggtccgctggggcaacgggttatggagttcgttcaattgctaatttattgttggcgaaggcgaaataaatttattttatctaaaaaactgattggagatttttatgggttcattaagtgaattaatttcggttgaaattgatgttccaagtggtagtaagctaacgcttagccaaccggaagaatatccttcaccgctcattgaagctttagtcagtttatttagccaacgtaaacctgttcgccgtgcttttatcattcaggttcatgataaaaatgtggatgaaaaccccaatttattaattggactggaaataaatggcaccgcagacgaaattgagcaactgatccatgaagcgggcactattgcttgtgaatacacatcggaagaagagccgattgacttctgtttagttgatgaaaaagagagtggcatcagccattatttgattcagcatactcagccattttaccagcgtaaattaggcagttggttacgtgaaagcattccggttatgaataagtgattatttagcgggtgataatatatacccgtcatcttgaaagataacgggtatagcagctttatctgtatctggtagtcaagctcaataacttttaccaggtttttaacttgaaaagccgaccagattctccttcgtcatgcagttgaagaacaatttctgtactgtcaaacactggcagctctttaggagatctagtaggaagatctgaatctattagtgtgataacagactgaatacctaattcaacgtaatcgcgtaaaatagccaataaattctctttctttctattatccaaagactcgaatactccatcatgaaaggcaaaatgaggaaatttctcacctttatgaactcttagtacagctaaatcaaaagcgatacatagcagctttctataagtatgtcctaaatctgcactcgttgcgttgcctgattcatcaagaatttccgctttaaattgcaagtgtccctctcgatttggagatacactgagcaatgctttacggctaatgacagtatcaacaatttcactaaaatagagccgaatttgagagaaaatgctagcttgatcggagttctgagactcaacattattctcaattttggattgtaaatgactacactcttcggaaagcgatcgaatttcagttctaagctcttgcaacttgtgtagatgtgccttttgtctctctagagtttcaatatctgcacgtaaggaaacgagttctcttgagagaattttatatttggaaaaaacctctgtgtcacttaagaatgacaaacttttcgaacgacgtgttcctagttcgtttagcctagtgtttatgattctcaatttggcttcaatttctgacttttcttcggtcagatatccaaatcgttcttcagttatcgctttattaaatcctaacagttgttcgaagtccttttttatctgaccgctaaaaagcacgcctgcctcattgaaaagcttttcagcttcttcagtattgaataaaactttatcctcctctaaggattttaggattttctttctattctgatttaacgaatatctttcctgattaagacttgcgatctcttcatctatctcttcaacaagtacttttgttttctctttgtcttgttgtcgaaaatcaaacgcatcaagaagttcctgtttcttctccgcatctttcttctttaatagcaaaataccttcaactttactgatgtcttcgagtgacccccccaactctttctttaccgctttttcagttgtctgtttctcttccagagctttttcttttttatagtgttcttttataagctctgcattaaatccgagtatatgagagagatagggcttccatgatgcatctttggaacgaaactttctcaattggaaaacatcgctataatcatcctgagatcgaataaggtatccaagactattgcgataactccagggttttatcacgctaagatcaagtaaactatctagcagctctttggctttatcaaaagagacatcttcatgatcccattgatctgtaggcaaaagagagtaatcttgatttttttcttgatgtttcttgaagcatatcttcgagggttgggcaacatccctacggatagtcaagaaacttgaatcttttagttcgatctcaagaaaaaagacaaactgattaaatatgtcagggtgtttaaataggaaaaagtctgtatttcgcctagataatagtgcgaagtctatcacacgacccaatgtgcttttccctagattatgtgtgtctttttctttgttttctgggagccgaatttcaccatatataacattaagcccttcgtgaaaagcaatgggctcaaaaagagatggcttgtttgaataaatcttagatagtttcattgttattagctacatattcaatggcatcagttttaggacgatattcaatgatacccataataaataaaaagtttagagctgggagaaacaatacatcaccaccggaaactgctttctttgtatagctcagcaggtcgctataattctcaattctcaatcctttaagacgtgaaataataatcaaagcaacattgattactgttctgtctggatgggaatgtttagttggtcgcagcatattcttcttcactaccgatgtcgcaattccaatacatgtaaaaaagcattattttagtaagtcgtctatgcttttttagaacaggatcccttccaaaaagaagatcgaaaaggtaattcattacgctatcaaagttttgatattcctttctttttgcaattattttaagttgaaactcttcaactacattttcatagagctgcataatttctgcattttccggtgcagccagaaaagctttaatttgagctgtctctttcagatatctccttcttaatatttcagcatattcgttgctcatgttgttaatttggtttttctgactatagggtattctgggggttggtggatcgtctttcgtagataaacctttttttgctgagccgctaaagcgtatacaacatcagaaagagcgtcggggcttacgattaaaggggagtccaccggatcaagagcagctctcccagcaaccttcggaaaagatttaagccatgtttccaataattctataccacaaaggcaaatagaggattcgggtatatcgcacttttttgctaaataggatcttatctcactttctgcattacctgccagccgcctgttagaaaacaacatgtagtgatctaattgtttcgcatttcgtagctttttaatcctgacaatttctttacttaaaacacttgagttgccatcagggttgtagaaatcagactccgaaaagagcttgttgtacccgttagtatgttttgcttggataatgatggtgccactccaaggtgcagatatgctgggataaagagcgctggtacctataaacttggcatctctgccgccatcggggcctttcgagaagccttgtacggcaatcccatgtagttcttggcataaaaaaacgatcagttgctcaaattggtcgtcacccaaatcttcataagcatacttcatttatctataaattcccctgttggtttaatagggataatttcaagccgcattccaatcgcatttaatgatgaacacggagttcttatggtcggattcctgttgctgagagtgctttgtagagagattctctagataaaccagtctctttggcaataaaggagaatccaccatgcgccttggcaacttgtcttgcagtttccagtaacaaacgaacatcttgagttttcctgctctcattcaattctgggttaaggtgtccaatagcactcttgttttttacagatttacccaattttcctaccccccttttaacttgttatcagaagttagtgtactgtagcttaaaagatataaactataaatagtaatcttagctaaaaaactgggatagtctattcatcaataggctatcctttaactataatgaataaactaaaaatcagaaagtgataattataatccaattttattttatatataataggataatattaaatcggagatttaaattaataaattaaaaactaagaaaataatagtaaaattcaatgccaaagataataacgaaacaaataaattcaaatcctgacaacctgtaaataactcggctcctacattatatattaacctcttgtcttttaaataaataaaatagttttcaattgacatttctattttttacaataaatctaattttattttttcagaaataaacttacagaatagataaagtgttcgttacctgttaatacgaattttccttattttttagattgttttaatagtcacttaataaaattattaataaatgattttataaaaatttttaaattcactatatgaatagttaaatagataataattttataagaaaacattgataaaaattagcaatatttttttgccttaaatagctatgttatacaaaacaattgtttatttgttttatgctatttttatcacgtttatattaaataacttttcaaaatagtagaacacttggagggaactcagtccaatttttgcaatctgatcaattgtagataatcccaaaccactaaacggactgagttatgcctatcatagcacctataccccgcaatgaacgacgccagatgaaaaaaattatccagaacacccgagataaagattatgctcgcaggctcatggccatattgatgctgcatcgaggcgagtctgtctctctggtcgccaaaaccctttgcgccagtcgttcttctgtctatcgctggataaactggttgactttatatggtctggaaggactcaaaagcctgcctgtgggcagacccgctgtctggaatttaatcccgctttatcctttactgtcttttttattgcaatattctccccagcaattgggctgcctgcgttctcgctggagtcttgagttttttataattaaaatcaatgaattattaaacataaaattatccatcagtaccttctatcgttacttacataaaatgggtatcgtgtggcgaagggcagccccgacgcttaaattacccgatcccgagtaccatgaaaaaatggcgaaaattaccgaggcattgtcaacgtgttcagaaaaacatcccgttttttatgaagatgaagtcgacatcgagctgaatccaaaaatcggggctgactggtatttaaaagggcaacagaaacgtatagtgacaccaggaaaaaaccaaaaacattattttgcaggttgcctgaatgttcaaacgggaaaagtgacttatgctgacgggttaaataagaattctcagttatttatcaatgtattggaagaacttgaacgccagtattgtcatgctgaaaccctcactttgattttggataattacagtatccataaaagccgacgggtcagagattggctggcttgtcatcctaaatttaatctgttgtttttacctgtttattcaccctggctgaataaaattgagcgtctgtggcaatccttacatgaaacggtgacacgaaatcatggctgtcagtatatgtggcaattgcttgagaaagtgaaaacgtttttaaattcatgtccctacaggaatagcagagaataaaaagagtgagtgtattataattatgaaaagttatttaaaaaaatatgttaattattttttacgtaattaactttagtgttacttttatggacagggattttaaattgcgtggccgggatagcccattgtttctaggttttattgacaggtgtttaattaaatagacaggttttatacccaatggatttcaagatggatcgcgacggcaagggcgcgaatccccgggagcatagagccgtcattccgcaccgtatttctgatttaaaaataatgtgatcttacacaggttttttgtattgatgacatcggtggggttgacggtaatcgccaattttgatctattacttttatttgccggaaagcgaatatgtccacacctatacctgccattaaacgtctcgatcatcttggccttatcgccgctttttgtcatgaagccggtttaccccgcatgattgatgccattatcccaaaatattcatcgcataccgtctctcacggcgacgcttttctggcgatgatccttaacgggctggggtttcacagccggacattgcacatgttttccggcttttttcaacataagccgattgcgcgtttaattggcgctgacattgaagctgaacaccttaatgatgatgtgctcggccgaacactggatgccttatatgaagcgggggtgtcggaagtttatcaggtgcttgctgagcaagtagttgataaattagggttaaatcccgattccgttcatttggatatcacgagttttcatgtcgatggtgactatgacagcgcgttgggagatgacacaaaacgcattgcactggtgccgggttatagccgggatcaccggcctgaactgaaccaggttgtccttgaactgatttgcgaaaatcaggcaggtatccctgtctatatgcaggctatgagcgggaatacgaatgatgccaaagcctttgcccagacgatcaaaacccatattcaatgcctgaaagcagcacaaaacagccgctactttgtggccgatgccgccctttatactgaagccgcgatcgcttcgcttcatcagcaaaaacaacgatttattacgcgtgttcccctgacgatcaaggaagctaaacagtctctcctgaacgtgacagcggagcaattcagccccatcagtgagggctattcaggctgctgggtgacgtcatcatatggcggcgttcctcagcgttggttactggtgaacagtacggcggcagaaaaacgtgaaaaccagactttccggaaaaacacactcagggaaacagaaaacgagtctaaacagttcgacaaactgggcaaaaagccctttgcctgccgggaggatgccttacaggcactgcatgattttgagtctcaatgccagtttatcggcatcgcctcgccggaaattcaggcgattaccgcgtatgcggggcgcgggaaacccggcaagcatcaaccccccaaatcggttcattatcaattagccggtcaggcttatacccggttagacaaggtgaagcaggccagattgcgggtcgggaggtttattttagcgaccaatgaacgggatgaaggacggcttgatatggcggcgttactggctaattataaggcacaacaaaaggtggagcggggttttcgcttcctgaaaagtccggaattcctgacgtctgccattttcctgaaaaaaccggagcggatagaagcgctgttaatggtgatgacatgttgtctcatggtttatgcggcgctggaacataaaattcgccatgaattgaaacaaaatgtgccgtttttccccgatatgaagaacaaaccgacacaatcccccaccgcgcgttgggtatttctggcctttgaagggatcagcacctttgaatttcaagaacataaaatggtgacaggaatgcaatcttaccaccatgagcttttgagtttattaggtgcacaatataaagcggtttattcctgaattaggtgcggaatgaaggatagagaacgatgtgatcggagtgagtgcagccaacaaagaggcaacttgaaagataacgggtatatatctaagctttgaacttatggagaaatatatgtctttaaagaggaaaatttcatatttggaagaagttagtggttcagcaaaggcaaatgaggtattgacctggctacaggcttatattccaggtaaagatcctaatattgtcgttgggcatgagcccagtaaagatgcggcgaaagagttaatccgaagtgattaccgttgggggcatcagagtaatgacaaatctgaaactttccaattaacgtataatttcctggagaatgaaccggataatatgccgtggattatttctggattttcagcatttaatgaagaacaagaagctgctgcaaagctgtcaattcaatcttgggctgatgtcgcgaatattaaattcaccgaaacctatgatgtcaaggaagcgaatatcacttttggtttctttgattttagtttaacaggtgattatgcgtttgccgagatgccgaatccaggtttgaaacaagtcggaacttggtatatacccaagaaacttcaagatgcagtttttagcacctgaaaatggtcgttaattctagacatcagcgagtccgctatatccggtagcgttgtggtgaaaaatttgaagacgttgtctcgaaattcatgtttatccgcaaaataacggttatttcgaacctgttcattcatgaccttccataatcgctctattgggtttaaatttgggctatagggaggaaggtaatgtaactcaatattgctaacataagcccactccttaacaagatgagctttgttgtaacccgccccatccacaataagatgaattttttgatgatagtcaggataagactttcttatttcattgaaaaaacagcaaatgttgtagtcattgatggtttgatattcctggaacaccgtacgaccaatggcattcaggttgagcgcgcccaatatattcaggcgagtccggcttcctgttgtttttactgtttttttctcgccttttcgcatccagccataaccgagtttggtgccttgagtcgggtgaacagcatcaagaaaaaggatgggttcgtctttcgctgtgactttaagattctcataatattcaataaattgtcgctgtttttctgcgtcgaatttatgagggacgccacaaggttttttataagaaaaaccctgacggtgtagccatttattcatgccgggaatgctaaaggtaatattccagagctgagcaacataggccacgatttcatgggtgtgatggaaaagatgttgagataagtgattgattaaaaaatcagtttgttcttgagaaagcaaactatcagaccccccattatcagatttaagtttaccttgattaaggtaatcgctgatatgacggttaacggtcatttcatgaagacgcagggcctgagcgatcatcactgaactccagccttcagaggccagcaggaccgctttgatgcgatcacactccctcttatcacggcaggtgtgatggagatgttcaagttcggctttttgttcatcggtaatgaatattttcatagcgaggataatgatctccatttcggataaaatcaagcatcttcaatgattacgggtataacgcggaaagcggtactttcttaaaaaatgatattggagtgaatggctatggtcgccatacatttactcatgagatcggccatacattagggttggatcatccggctgattatgatgcgtctgataaggtagtaccgacttacaagaataaggcgacttattttgaagatagcggtgcttataccatcatgggttatttcagtgaaaaaaataccgggcaggactttaaaggtattgattcttctgcgccattacttaacgatatttctgctattcaggcgttgtatggtgcaaataatactactcgtaccgatgacacggtatatggttttaattccaacactgatcgcgatttctttacggcaaaagatgcaaagagcaaacttgtgttcactgcttgggatgcgggtggtaatgatacctttgatttctctggttttactcaggatcaacgcattaacttgaatgaagcttctttctcggatgtgggtggtttgaaaggaaacatctctatcgcccgtggtgtcacgattgaaaatgcgattggcggcagtggtaatgacattctgatcgggaatgatgccaataatactctgaagggtggtacaggtgatgacatcatttacggtggattgggagctgatcatctttggggtggggaaggcaaagatacctttgtctacttgaatgccgaagaatcatcgtttcttgagcgtgattggattcatgactttgtttccggtgaagacaagattgatttgtcattgttcgatctgggtgcagcaggaaaaggcactattaagtttgtcgaggaattcactggtgctattggggaagctgtgatcagctatgacagcgttaacaaggtaaatgatttcgttattaatatgggaggagaattatctcaagatggttttggggtgaagatcgttggagaaccgctgatagaggccgatttcatcctttcataacacaaccacacaaccgcatctgaccggatgcggttattcgtttagtcactttgagcgcttgggcgtgcaattttgctctcttctgtattctgtcttctgttttctgtccatgtggttggagttcctaatctattatttttctattatataataagtcaaatacatttgaataagtaattaatagtgtgatttttctattttataacaataaacaaataatctatttttaatttaaaattatttactgatgatattaaatgtaattaatgcatacattgctcgtattatttcattatgacaaaacaatatatgtggaagttagttttagtttgaaattgtttcatgccggtgttaaatgtaattaacgtttacattagttgtataatttgattattataaaataatatgtaatcagactagttgataatttttatgtgtataaatatacattaatcaatataaccaagtgataaataatgtctttttatggtggaatctgtttcctattggaatgcggataggtccatttttcagagaattatcaaagtaaattcggtgttaattggggagcaggaggtttagtttgtctcgataattatttaatttttcgtgaaataattcacatatgatattaattcaaaatggacagaatacagcagggatttaatactcatgccagtaaatatattcaatatacccaatagatttcaagatggatcgcgacggcaagggagcgaatccccgggagcatagataacgatgtgaccggggtgagtgagtgcagccaacaaagaggcaacttgaaagataacgggtataaatccatttttatttagttatggaattcagcgtcagccaataaaaaattgcacaaaatcaaaggcgcttattaaaaaaataggaaaaaaatggaatatcttttgccggttcacttggtgaatcgtttattccgttatcaggaaaataattgtcgaagaattgctaattatgaggctattaaccgggctattacctccagcgtccaagagaatgtgctgtctgaggattttaattgatgcctgatgtgtgcccgtttttatttcttggggggaaggaagaagggcaaaacatttgtgatgactgttgagaatgacagttttcaaataactaacagattcattgaggtagtaagtagatgaaagatagcatggctaaaaaggaaattatctttgatgctggattagtgcaagtactgtcaaacaaggtcggtgacgacatatctgttcagaaacttaatttgttgtcagaggctgaacgtacactgctattggaaacttggaatgccactgaaaccgtctatcctgaccagttaggtatccatcagttgtttgaacgacaagtggagaaaaccccgactgcgacggcgttaatcgcaggggataagaccctgagttatgcggaattgaatgcttgtgctaaccgactgactcatcaactgattaagcaggggattggcccgaatgatcatgtggcaatcctgttagagcgatctatcgaattggtggtagctcaattggctattctcaaggcgggggcggtttatgtccctatcgataccagcgtgccggacgagagaaaaaagtggttgataaacgatggcttcgccaaattgttgctcaccggcgcacaagcgaatatcccggctaatctggatatcccgctaattcgtctctctgatgagacagacgcggacaaggcggaagagagttttaatcctgacttactttattccggtactgcgccagcgtatatcatgtacacctccggctcgactggcacccccaaaggggtgatcgtgcctcaccgcgctgtggtccgactggttattaataatggttatgttgaaattgaacccaatgatcgggttgctttcgcggctaacccggctttcgatgccagtacttttgaagtgtgggcccctttactcaatggtggggcattggtggttatcgaccacaccactttgttgacgccgccggaatttgtacaggaattagaccgttatcaaattaatatcttatggttaagcgtcggcctgtttaaccggctggcggcggagttgtctccagttttgccgcagttgaaaaacctgattgtcggcggcgatattcttgatccctatgtgatttcccaggttttacgcaacaacccacctcagcagttattgaatgcctatggaccgaccgagggtaccacctttaccaccacatatcggattgaaaccttgcccacgggagtgaccaacattcctattggtcgaccaattgccaacacgcgggtttacttactggatgagcagggccagcccgtgccgttggggaggatgggcgagatctatgttggtggcgacggggtggcctgtggttatctcaatcgccctgaattgactgctgaacgctttttggttgatccatttagtgatgtgccggatgcgcggatgtaccggaccggcgatttagctcgctacctgccggatggcaatctggaatttttgggccgcaacgatcagcaggtgaaaatccgcgggttccggattgaaccgggagaaattgaagcccgattggtggagtattcgacagtacgtgaagcggtggtgttggcgttaggtgaggggcaggacaagcagttagttgcttatgtgctggcagagtcggataacgaattgcctacccacttgcgtgagcacctaagtgcgcgattgcctgattatatggtgccggtggcctttgtacggttggatgaattcccgctaacacctaatggcaaactggatcgtcgggcgttaccggcaccgggtgaaaacgcctttgcccgtcaggtttacgccgcaccgcaaggggagcgggaaattgcattggctactatctggcgtgagttattgggtattgagcagataagtcggtatgacagcttctttgccctaggcggtcattcactgctcggcgtacgcatgattgaacagctacgccatttagggctgacgttatctgcccgcgacctgtttcaatcaccaatactggcggagttggcccaaacattggggcagcatcagattgtgacagtgccgccgaatgtcattaccccggcgaccaccgcgctgacaccggagatgttaccgctgattgatttgactcagcctgagattgatcacatcgtcgagcaggtgccgggtgggggggctaatattcaggatatctatgcactgtcaccgttgcaggacggtatcttgtttcaccacctgctggcgaaagaaggtgatccttacttgctggcctatccaatgatctttgctgaccgtggtttgctagaccgctatttatttgcggtacaacaggtggttgaccgtcatgatattttgcgtaccgcttttatctggcaaggattatctgttccggcgcaggtggtttggcgtcaggccccattgtcagtcactgaactgacgctgaactcggctgacgggcccgtcggtgatcaactggcgcaacgttttgatccgcggcaataccgtctcgatctcagtcaggcaccgttgttacgctttgtgatagcacaggaagaggatggccgctggtatgtattgcaattacaacatcacctgattggcgaccataccacgctggaagtcatgaacctcgaagttcgggcctatcttgacgaacaggatgataacctgccgacaccggtacctttccgcaatctggtggctcaggctcggcagggggttgaccagacagaacatcaccgattctttaccgacatgttggcagaagtggatgaaccgacattaccgtttgggctgaccgaggtacatcgtgatggttctcaggtcacacaggcgcaccggatgttgtctcctctgctgaatgatcgtctacgtgctcaggcgagacgcatgggtgtcagtctggcaaccctgtgccatctggcttgggcacaggtgctgtcgcgtaccagcggacaagagaaagtggtgtttggtaccgtgctatttgggcgtatggccgccggggaaggggccgacagtggcatggggctgtttatcaataccttaccgttgcggctggatatcgatgatacctcggtacacaatagcgtcaggatggcgcatacccgattagctggattgttggattatgagcatgcttcattggcgctggctcaacgttgcagtggggtacagggcggcacgccgctttttagtgctctgttgaattaccggcataatgagcaaccgatgatcccgcatgaggtaatgccgggtattgaatttctcggtgaacaggagcggaccaactacccgtttgtgctgtcggtggaggatggtggcgataccctggggctgactgctcaggtagtacaaccatttgattcagaacgagtatgtggttacatgcaacaggcgctggaaagtctggcggatacccttgaacaggccccggaaacgccggtacgggcgctaaatgttttgcctgcatcggaacgcacgttgttgctggaaacgtggaacgcgacagaaaccccctatcctgaacaacgctgtattcatcagttgattgaacaacaagcggagaaaacgccagaggccgaggcgttggtgtatgaaaatcaaacgcttagctatggacaactgaatatcagcgctaaccggcttgctcatcaactgattgccttgggtgttgtgccagagcaacgggtggcgatttgtatggcaagttcaccggcgcgggtgatagcggtgctagcggtgctgaaagcaggcggaacttatgtaccgctggatccggcttatccgggagaacgattgtcacatatcctgaccgatgccgtcccggctgagggggtgaagacaatcgggttgaaggcaatgggggtgaaggcaatagtgttggcggatagtactgggcaggctgcattgggtgagcaaatgcttgcggggctgacggtactagacccgaatatcttacctgatcagccggataacaatccgcaggtttctgccttaacttctcgccacctagcctacgtgatttacacttctggatcgaccgggatacccaaaggggtgatgattgagcatcgtgggctagtcaatctgatccgggataaaattatccaattcgacattcgccctgttagtcggatgttacagtttgcttcatttggctttgatgccggtgtctgggaaatcatgatggcattaggcagtggagcctgtttggttattccggccgaaaccgttcgtcaagatccgagtcgcctctggcattacctggaagaacaatcggtgacgcacgcttgcttgacccctgctttgttgcgagaaggggccgatttgccaacgataacaataaaaccgacattaatattgggcggtgaagcccctagccccgtgctactacgggcgctaagtcatcaagcaatcctatttaatgcctatggcccgacagaaattaccgtctgtgccaccagttggcgttgtccatcacactatactgatgtgttggttcccattgggcgtccgacagcgaatacccgtatttacctactggataaccacggccagccagtcccattgggcgcagtgggggaactctatattggtggggatggtgtcgcccgtggctatctcaatcggccagatctgaccgatgaacgctttctggctgatccatttagtgatgctgccgatgccaggatgtaccggaccggggatttggtgcgctacttaccggacggcaatctggtgtttgttggccgtaacgaccagcagattaaaatccgtggtttccgcattgagccgggagaaattgaagctcggttggcagagcacccggtggtgcgtgaagcgcgggtcgtggccttgggagatgggcaggataaacgtttagttgcctatgttgtagccgaagcggatagtggactggcggccagtttgcacactcatttgagcgcgatgttgcctgattatatggtgccagcggcctttgtgcgtttggcgaccttcccgctgacgccaaacggtaaattggatcatcaggcattaccggcaccgggagaggatgcttttgctcgccaaatttatgtcgcgccacagggagacatggaaatcgcagtagcggctatctggtgtgaattactgggcattgagcaaatcggccgacacgataatttttttgccttgggcggacattccctgttggccgtgcggatgatgaaccggatagccgctttcagtgttgacctgccgttggccgcgttgtttgtgtctccgtcattggcgacatttaccgagaaaatctgcgcacagatctgtgcacaacgtaatacgggcagtgataaattgcctgaaattaggtccatatcccgtgatagtgtcttgccgttatcatttggtcaacagcgtctgtggtttctggcgcaatttgagggagttagtgatacctaccatattccgacagccttgcgtttacgtggacggctaaacttttctgcctggcagcaggctctgaatcgcctgtttgctcgccacgaggcgcttcgttctgtttttatcacagttgatggtcagcctcaggttgaactgttaccggcggaatttggtctaccggtgaaaaaatacgatttgcgtaaagcatctaacgtggacaaacaatttaagcgtttgtgtgtacaggaagccaaaacgccgtttgatcttgctcgtggccccctaattcgttgcgcattgatccaactggccgatgaagagcatatattcttactgactcagcatcatattatctctgatgcttggtctttaaagatacttgaatcagaactggttgcactttacgcggcgggtctaaatcaacagccagatccgttgttgccattgaccattcaatatcctgattatgcggcttggcagcggcaggtattttcaggtgaaggagtacaggcacagagtgattattggcgtcggacgttggcagatgcaccggtgttacttgaattgccgatagacagacctcgaccctctcagcaatcatttaccggcggccgggtagcggtgcacattgatgccccgttggtacaggccctaaaacatctggggcaacagcacggtgccacactgtttatgacgctgttaaccgcttgggctgcattgctatcgcgcttgtctgggcaggatgatgtggtcattggtataccaagcgctaaccgcaatctgcgggaaattgaaccactgcttggcttctttgttaacacattggcgttgcgtatcgatttatccgacatgccggatgtggccacactactgcggcgtgtacggcagacgacactgggagcgcaggagcatcaagatctgccgttcgagcaggtagtggaaattgttcaaccgccgcgtagaccggagcatacaccactgttccaggtaatgtttgcctggcaagagagtgaaacagaggaatggcaattaccggaattggcggtaacgccatttgagctaggatacgatatagcgaaatttgatctgcaactggaattaacggagaaggcgggcgaaattgttggagagctgaactactcttctgccctgttcgaccatgaaaccattgaaagacaggtgggttatttgcaggctatattgtgggcaatagtgaaccagcctcaacaacctgtcacggctatcgatattttgtcatcctctgagcgggagttattactggaaaattggaatgcgaccgaagaaccgtatcctactcaggtatgtgtccatcagttgtttgaacaacagatagagaagactccggacgccatagcggtaatctatgaaaaccagacgctcagctatgcagaactgaatgcccgtgccaatcggctagcccatcagcttatcgctttaggcgtagcgccagatcagcgggtggcgatttgtgtgacgcgctcacttgcgagaatcatcgggttattggcggtgctgaaagcgggcggggcctatgtgccgttagatccagcctaccccggtgaacgtctggcttatatgctcactgatgcgacaccggttattttgatggcggataatgtcgggcgggcagcattaagtgaagacattctggcgacgctgacggtgctcgatccgaataccttgctggagcagccagaccataatccgcaagtctctggactgaccccacagcatctggcctatgtgatttacacttccggctcaaccggtagaccaaaaggtgtgatgattgaacatcgtagtgtggttaatttgacgctgacacaaattacccagtttgatgtttgcgccaccagccgaatgttgcagtttgcctcatttgggttcgatgccagtgtctgggaaatcatgatggcgctgagttgtggggctatgctggttattcctacagaaaccgtgcggcaagatccacagcgcctttggcgttacctggaagagcaggcgataacccatgcctgtttgacaccggctatgtttcatgacggcaccgatttaccggcgatagcgataaaaccaaccttaatatttgcaggagaagcgccgagtcccgcgctatttcaggcactgtgcagccgggccgatttgtttaacgcgtatgggccgacggaaatcaccgtgtgtgcaaccacttgggattgcccggccgattataccggaggagtcatccccatcggcagcccggtcgccaacaaacgtctctatctgctggatgaacaccgccagccagttccattgggcacagtgggagaattgtatattggtggcgttggggtagcgcgtggctatctcaatcgtcctgaattgacggctgaacgtttcctgaatgatccatttagcgatgaaacgaatgcccgaatgtaccgggcaggagatttggctcgctatttgccggacggcaatctggtgtttgtcggccgtaatgaccaacaggttaaaatccgtggtttccgcattgagccgggagaaattgaagcacgactggttgaacactctgaggtaagtgaagcgctggtattggcgttgggtgacggtcaggataaacgtctggtggcttatgtggtggcgctagcggatgacggactggcgaccaaattgcgtgagcacctgagtgatattttgcctgactatatgataccggcggcttttgtgcgtttggatgcctttccgctgacccctaacggtaagctggatcgccggtcgctgccagcaccgggggaggatgcctttgctcgccaagcttaccaagcgccacaaggggaaattgagatagcattagccactatttggcgcgaattgctgaatgttgaacaggttggccgacatgacagtttctttgccttgggcggtcactcgctgttggcagtcaggatgatcgaacgtttacggcgtataggattgggcctgtcggtgcaaacgctattccagcatccgacattaagtgtattggcccaatctttggtgccgcatcgtgaaattagcgtgcctgataacggtattaccgcggataccactgtgctgacgccagcaatgttgccgctgattgatctgactcaagctgaaattgatcgtattgttgagcaagtaccgggtggaattgccaatattcaggatatctatgcgttgtcaccgttacaggatggcattttattccaccatctattggcaaatgagggtgatccctatctactgattactcaacaggcttttgctgatcgacctttacttaaccgctatctggctgcggttcaacaagtggttgaccgccatgatatcttgcgtaccgcctttatctgggaagggttgtctgtgccggctcaggtaatttgccgtcaagcacctttgtcagtgacggaattgacgctcaatccggctgatggagcgatcagtaatcaattggctcaacgttttgacccgcgtcggcatcgtattgacctgaatcaggcaccgttattacgtttcgttgtggcacaagagagcgatggtcgttggattttgctgcaattgttgcatcacttgattggcgaccataccacgttggaggtgatgaacagcgaagtacaggcttgcctcttggggcaaatggatagcctgcctgcgccggtcccgttccgccatttagtggcacaggctcggcagggtgtcagtcaggcagaacatactcgcttctttactgacatgttggctgaggtggatgaaccgacgctgctatttgggttggcggaagcacatcatgacggttcacaggtgacggaatctcaccggatgctgacagcgggactgaacgagcgcttacgtggtcaggcgcggcggttgggcgtcagtgtagcggcgctatgtcatctggcttgggcacaggtgttatcgcgtaccagtgggcaaacgcaagtggtgttcggtacggtgctgtttggacgtatgcaggcgggtgaaggatctgatagtggcatggggctgtttattaacaccttgccgttgcgattggatatcgataataccccggtgcgggacagtgtacgtgcagcccatagccgactggcgggattgttggaacatgagcacgcttcactggcgctggcgcaacgttgcagtggcgtagagagtggtacaccattatttaatgcgctgttgaactaccgacataatacccagccggtcacaccagatgaaatcgtgagcggcatcgaattccttggcgcacaggagcggaccaactatccatttgtgttatcggtagaggatagtggctctgatctagggctgacggctcaagtggtgcaaccattcgatccagaacggatatgtggctatatgcaacaggcgttggcaagtttggtgcaggcgcttgagcaggcgtccgatatgccggtacagcagttagacattctgccggcaactgaacgcacattgttgttaaaaacttggaacgccactgaaacagcctatcctgagcggttgtgcattcatcaactgtttgaacagcaggtggaaaagaccccggatgccacggcgctgatacatgaaaaccaatcccttagttatgtggaattgaatgctgatgctaaccgattggctcaccaacttattgcgctgggtgtagcgccggatcagcgggtggcgatttgtgtagcaagttcaccggcgcggatagtggcgctgttggcggtgttaaaagcgggaggcgcttacgtgccgttagacccggcctatccgggtgagcgtctggcccatattttgactgatgctgaaccgattattttattggccgatagtgttggtcgttcagccttaggtgagcaaatgcttgtggggcagacagtgattgatccgcattcattgcctgatcaaccggataacaacccacaactatctacattgacctcccgtcatctggcgtatgtgatttacacctctggttcgaccggcacgccaaaaggggtgatggtggaacatcgtgggttagtcaaccttattcaggataaaatcgcccgatttgacatttgccccgctagtcggatgttgcagtttgcttcatttggttttgatgcgggtgtctgggaaatgatgatggcgctatgcggtggtggtgctctggtcattcctgatgaatctgtccgtcaggatccacagcgcctttggcattatctgcaagagcagtcagtgacgcacgcctgtttgaccccggctttgctgcgggatggggctgatttgccggtgataacggtaaaacctaccttgatattaggcggtgaagcgcccagtgtggcgttgcttaaagcgttgcgcaccaaggccacggtattcaatgcttatggtccaacggaaatcaccgtttgtgcaaccagttggcgttgcccgccaaactataccgatgtgttatataccgatgtgttagttcccatcgggcacccaacagccaacacctgtctctatctgctagatgccctcggtcagcccgtgccgctaggggcagtgggtgaactctatattggtggcgtcggtgtggcgcgtggctatctcaatcgtcctgaactgactgacgaacgtttcctggcagacccatttagtcatattgctgacgcccggatgtatcgaactggggatttagttcgctatctgccggatggcaatctggtgtttgttggtcgtaacgatcagcagattaaaatccgtggtttccgcattgaaccgggagaaatcgaagcccggctgacagaatactccggggtgcgtgaagcgcgggtactggccttgggcgacggacaggataaacggctggtggcttatgtggcggcggaagcggatgacgggttggttaaccgtctgcgtgaacatctgagtggattgttacctgattacatggtaccggcggcctttgtgcggctggatgcttttccgttgacgcctaacggcaagctggatcgccgggcattacccgcaccgggggaggatgcttttgcccgccagatttatgctgcaccgcaaggagaaaccgaaaccgcactggctgctatctggcgtgaattactcggcgttgagcagatcagccggtacgacagcttctttgccttggggggccattcgttgcttgcggtacggatggttgaacgtttgcgtcatttgggtttaacgctggcagtacgtgatctgttccaatccccgatattgtctgaactggcgcaaacattaaggctgaatcagaccgaaaaagtgccggccaatgtgattacaccggccaccacggtgttaacgccagaaatgttaccgctgattgatctcactcagcttgagattgatcgcatcgtcgaacaggtaccgggtgggatagccaatattcaggatatctatgccttatcgccgttgcaggatgggattctgttccaccatttactggcagacgaaggtgatccttacctgctagcgggtcaaatggcctttgctgatcggcctttgctggatcgttatctggcggcggttcagcaggtaattaaccgtcatgacatcctgcggaccgcctttatctggcaaggattgtctgtaccggctcaggtcgtttgtcgtcaggcaccgttgtcggtgacggaattgacattagatgtggctgacgggccgatcagcgaccaattagcacaacgttttaacccacgtcaatatcgcctcgatttgggtcaagcgccgttgctgcgttttgtggtggcacaggaaagtgatagccgttggattgtgttgcaactgatgcaccatttaattggtgaccataccgcgctagacgtgatgagtaatgaagttcagacataccttgacggacagggcggcaacctgccagcgccggcacccttccgcaatctggtagcgcagtcccggttagggatgagtcaggctgaacatacccgtttctttactgaaatgttggctgaggttgatgaaccgacgttaccgtttgggctggcggaagttcgccatgatggctcgcagatgactgaatcgcaccggatgttgacccctgagttaaatagcagtttacgtggtcaggcgcggcgattgggagtgagcctggctgccctatgtcatctggcttgggcacaggtgttatcgcgtaccagcggacagcagcaagtggtatttggtaccgtgttgtttggacgcatggcggcgggtgaaggggctgaaaatggcatggggctgtttatcaataccttgccgctacggttggatgtggatgataccccggtacgagaaagcgtacaggtagcgcatcaccggttggcgggattgttggaacacgaatatgcctcgttggcactggctcaacgttgtagcggggtgcagggaggaacgccgctgtttagtaccttgctgaactaccgacacaatatagcttcggtggaatcgaatgaaatcatgagtggtgttgaatttctcggtgcacaggagcggactaactatccgtttacgctgtcagtagaagattttggtgatgcactggggctgacagcgcaaatcgcccagccgtttgatgccgagcgggtgtgtggttatatgcaacaggcgctggaaagtctggtgggcgcactggaacacgccccggaaaccccggttcagcggttggaaattttaccggcagtagaaaggaaactgttactgaaagtcggcaatggcccgcaaacggcctatcccggctcgttgtgtattcatcatctgtttgaacagcaagtggcgaaaaattctgaggctacggcactggtctatgaagaacaggctctcagctatgcagaattgaatgcatgtgctaaccgactggctcatcagttaattgaactcggagtggagcccgatcaacgggtggcgatttgtgtcacgcgttcaccgtcaagagtagtggcgctactggcggtactcaaagcgggtggggcttatgttcccttagatccagcctacccgggtgaccggttagcttatatgctcacggatgcggcaccgtcagtggtactggcagataatgtgggtcgtactgctctaggtgaacaggcgcttaccgcgttaacggtacttgatccgaatgttctgcctgatcaaccggataacaatccgtacatcccggcgctgacctcacgacatctggcgtatgtgatttacacttctggttccaccggtacaccaaaaggggtgatggtcgaacatcatggcttggtcaatttaatttgggagaaaatcacccaatttgacattcactcggatagccggatgttgcaatttgcttcatttggtttcgatgccagtgtctgggaaatcatgatggcactgtgtgggggagctaccctagacattccggttgatagcgttcgtcaagacccgctgcgtctgtggcgttatctggaagaacggcgggtaacacacgcctgtttgaccccggctctattacgggatggggccgatttaccggcgataacgataaagcccaccttgatactgggcggagaagcacccagtgcggcgttgttgcaagcattacgtggtcgggcaacgctgtttaatgcttatggcccgacagaaatcaccgtctgtgcaacctgctggcgttgcccgccagactatactgatatgctgatccctatcgggcgtccgacagcgaatacctctatttatctcttggataatcagggccagccagtgccatttggagccgtgggggaactgtacattggtggtactggtgtcgcgcgtggctatctcaaccgctctgatttgacgactgaacgttttctgacggatctgttcagcgatcaaccggatgctcgtatgtaccgaaccggggatttagcccgctacctgccagatggcaatctgctgttcgttgggcgtaatgatcaacagattaaaatccggggtttccgcattgagccgggtgaaatcgaagcgcggttgatggagtattctgatgtgcgtgaggcgattgtattggcactgggagatggtcaggataaacggctggtggcttatgtcgcggtgctagaggataacgagctggcaagccaattacatcgtcatttgagagccttgttgcctgactatatggtaccgtcagcctttgtgcgtctggacgcctttccgttgacgccaaacggcaaattggatcaccgggcattgccggtgcctgatcagaacgcctttgctcgtcagatctatgaagcgccacaaggagaaacagagatcgccttggcggctgtctggcgtgaattactgggggttgagcgaattggccggcatgacaacttctttaccttgggtggacattcgctgctcgctatgcggatgatcaatctggccgcagaacgagggttgatttgctcattgaataatctgttccaattcccggtgctagcggaactggtggcagagatcacctcagattcgctgtctcaatcgcaaagcagcgccataccggtgcgaccggatggaaccgaaccgccgctcttcttcgtgccgagtggcatggatgactattcctatgtttttgggctggctcagcatattcaggcggattacccgatttatgcgctaccttggccgtctatcaatgaggagcagacgtcgaccattgaagctctggcgaccagaatgatcacctttgtgaaggccgtgcaatcagaaggcccgtatcggatatacggctactcttctggcggtatactggcttatgccattgctcagcaactgctgcatgccggagagacagttaatttcttggggctaattgatacaccggctccgcactgtttcaagacacgagttgatcaacctaaacttcagttccttgctgaattggcaaggcaatcagtggatgaacatcctcaagagattgccgcattgcatcagaaaatggatgaacttaatttagtgcaatttattgccgcagcgcaggagctggaattatacccatcaaatctgcgtcctgacttaattgccaaacgttggctacagatgggaaattatgtccagatggtcaaggattatcagccgaaagcactggcgataacactgcatcaattctatgcaatggaatcttatccacagatcccgtttgttaccgatgttgcgctacagtccgtcacaatggaaccgtcgttaggttgggaacagatagttcctgactcttcgctacagttaacctcggtgccgggggatcattttagtctgatggaagatagtgaaaataaaactattttagctaagaccttaagcatggcgctggcaatgaattgtgaagcggaggcgctgtaatgtcagtgatattgtgggatgaaaagctatatttaaacaaagatagttaaaaatcaatttgtccggttaaaagtttttataatagccggacaatcttactgaatataggcaccgaatgttaatcacttcggtgccttatttttttatcaaatcctacacctgatgctagtggagaaaccctatttttcagcattgtctacgcttgtaaacaatgtttacacttttaaacaactcttacacttttaaacaattattacacttttaaattaatttaaacactcttaatgcttcaatgtcgaatataatgggagttattttctgtcatttacacacttataatcctatgaggtttaaaataatgatgattatgtttctatcctttaaagcagaagatgctctgtgaaaatgtgagtaataggagttcttattaattcatcgtgctcgattattctcatctgtatgactgaatttattctcattcgcattaacttaagctgataatcatgcttatacccgtcatctttcaagttgcttctttgttggctgtactcactcaccccggtcacatagttatctatgctcccggggattcgctcccttgccgccgcgatgcatcttgaaatccatagggtatattttacttgttccactaaatattttacctgttgtgccgtgggggtgaaaattattttggctgttgattatcttattaattaattgaaaataaaagataatttaatatttaaaacatttgtttgacctatatggatgatatgattcaccggccgattaatatttttaaaacaagttcaatttttatgaaaataaattcaatttcgtttatatttcgttgatatattgtttattcaatctcttgattaagatgttttatcatctgattgagatgaagcaaaaaatgcttttagataaaaaatgacttgattttatataaatctgtttagagaatccctttacccagaaaaatagcctgcctgataaatccatttatctattgcagtgggtgttgtcggttttctcttattttccgcttggttagtgcctgctttgaaatatctgaatccggttttgtttctgaaatgcgttgtggcatgaacatcatgtcactcattctattttattgttgaggagtcacttatgacccatagttttcaaaacgagatccctaaatcgcgtattaatatcaagttagatttacatacaggaggtgcgcagaaaaaagttgagctgccgctgaaattattggtcatgggggattatagcaacgggcaggaacatctccctcttggggaaagaaaaaaagtggctatcaataaaaacaattttgatagcgtactggctgaattcagtcccgcgattaacttgacggtcaaaaataccttggccggagatggcagcgaggagaatatcgcccttatttttcggcaaataaaagacttcgagcctgaacaaattgctcgtcaaatcccgcaactgcgggccctgctttctatgcgccatctattgcgcgatctgagatctaacctgctcgataacaccacctttcgccgggaactggaacatatcctccaggatcaagcgttaagcgatgagttacgggctgaactggccgcactggcaccaaaaacgatttgattattacggtatatatcaggagataggattaatgactgaacaacaaaccgctgcggcggcgataacgactcacgccgaaggcagtgtttatcaatcgttatttaagaaaatcaatttacagccggtggagcagttaagcgatattgatcgctttcagagcagtgatgcgctggctgatgtgacggtagacgagcgggtcacggcggctgtcagcgtttttctctctgtgctgaaaacctcggcgcaaagggttaaacggctggataaggcattattggataaccatatccgcgagttggacgagcaaatcagccgtcaattggatgtggtcatgcatcaccctgagtttcagcaggtggaatctgcctggcgcggcctgaaattcttggttgatcgtactgattttcgtcagaacgtcaggattgaagtgttggacgtcaccaaagaggatttgcggcaagattttgacgatgcgccggaaattgttcagagcggtttctatcaccacacttacattcaagaatacgatacaccgggcggtgaacctatcggatcggtgattgccaattatgaatttgatgccggcacgcaggatattgcgctgttgcgtaatatcgccaaagtttcggcggcggcgcatatgccattcattgccgctgctggtccggctttttttggcaaacaaacgatggatgaagtggccgcgattaaagatatcggtaactactttgaccgcgccgaatacatcaagtggcaagcgttccgcgacagcgacgatgcacgctatatcggcttgactttaccccgcgtgctagggcgtttgccctatggcccggacaccgtaccggtgcggacttttaactatgttgaagaggtcaccggtccggatcacgataaatatttatgggccaacgccgcctttgcttttggtgcaaacatgatcaagagctttgtcagtaatggctggtgtgtccagatccgcggtccaaaagcggggggagcggtgactgatttgccgatccacctctacgatttggggaccggtaatcaggtcaaaattccatcagaagtgatgattccagaaacccgcgaatttgaatttgcgaatctgggcttcattccgctctcttactacaaaaaccgggattatgcctgcttcttttccgctaactcggcgcaaaaaccggcattgtatgacaccgatgaagcgacggctaacagccgtatcaatgcgcgtctgccctatattttcctgctgtcacgtatttcccattatttgaaactgattcaacgggagaacatcggcaccacgaaagatcgacgtctgcttgaaatcgaactgaacaactggatcaacaccttggtaactgagatgaccgatccttccgatgatttgcaggcatctcatccgctgcgtgaagcgcacgtcattgtcgaagatattgacgacaaccccggtttcttccgggtcaagttgtatgcggtgccgcattttcaggtagaggggcttgacgtcaatctgtcgctggtttctcaaatgccgaaatccaaaggttaacaataggggagcatcatgaaaattgagcgcccgctatgggtaacaggaaccatcttgtctccccaacagtttcagcagcaggctcgttgggaggcatatgccaatgagtcgattgctcgtctgggactggcgcatccttggggcgtgctgaccgcggtgtttgatcaacacaccttagcgttggggcagttgaaagcggatcacctgtgtgtgcgttttgccgatggatcgctgattgacaccgatcaggccgatcgcctaccgccggtgctggaattggccgccgttttgccgacagatgcgcagcaggtcacggtcttactggcattgccgtacacttacgccaatggcggtaactgtcttaaacccgatgaacgcgccgatcgtccggtgcgttaccagcaggagtgggtaccggtacaggatgaattcagtgatcgcagtgaatcgatggcggttgctcgttatgcgatatcgctgcgttttgacagcatggaaaacggtcaatatctcacctgcccggtggcgcgtctgttgcgcgatgctcaaggaaaatggatttttgatgagcaatttgtgccgccattactgcgtcttagcgcacatgccggttcgatagctcggctcgatcagttgttgacgcagttacgcgctaaacaggctcgattgatggcaatgcgccgagagagcaatgagcggatggcggattttgcggtggcggatgtgtcgttgttctggctgcttaatgcgcttaacagttatgaaccgatattgagtgattttaaggcccatccagatgtgcatccagaactgttctaccgtgaagcggtaaggctggcgggcagtctgttgaccttttcactggaccataacgccagcgtgatcccgcgttatcagcacgataatttgacggcggtattcccgccgttatttgacttgctgagacaattgctggagatcagcttgccgtcgcggatggtgacgattgagttgaagaaaccatcggaacagcagtggatagccactctccacgatgcccgtttatgtgaagcggcggatttttatctctctgtccgctcttccataccggcacaccagttgtacacccggttcccgctgttatgtaaagccggtgcgccggatgaggttgatcggatgattagccggtcattaaccggcatccccttagtcgcacttagccatgtcccggccgcgatcccgttgcggctggagaaccagtactttgcccttgatctcacccatccggcgggcaaagccatgctggcggcagggagctgtgctttctacgtgcccggagtactgggcgatattcagcttgaactgtttgcggtattgaggacatgaataaatcacctttatcaactaaaaaatcgccaccggatatcgatgccttgttacagaacagctacctgttggtggcagagctctgtcagggcgcatcggtggaacaggcggaggtggtgtggcagcactgcacccgcgagatagaacagacacggcaagcgctgagtgatgcggatgttagcgaatccgcgataaatcatatcagctacgcccagtgcgccctgctggatgaaaccgtgctggagcgagcgccggaacagggatatgcagcctggcgggcaacatcattacaggagcatttctttgataccgccgaggccggtaaccagttgtatgaacggatgcgtactgtactgaatgaaccggccgccgatcgggcagtactgtaatgttccggtgaactcaccttgcgtggtcagataaccacaaaatgggatgttaacggaagggattctcaggccagggcaacagctcattcaaccgattgttcggccagacaggcagccggctgaggacatcacgtaaccagacccagggctcatgtccgttggctttggccgtttccagcaggctcattatcatggccgcccgttgccccgcggccagtgaacccgcaaaaagccagttctttcggccgagcgccacaccccggaccgcattctccgcccggttgttgtctatcggcacccccccgtcatccagataacacaccagcgccgaccagcgcttcagcgtgtaatctatcgctttgcgtaaccccgagttgggggccgtttgggtctgcatcgtttgcaaccaggaccggaactcattcagccacggccgggcataacgctgccgccactgacgccgtttatccggcggccggtgtttgatttttcgctccagcttgtacaggtcacgaatgccatccagcgcctgtttcgccaccggactttggctcgctttgtattggtcaaagaatttgcggcgggcgtgagcccagcaacccgcttcggtgatatccgcccgggcatgcagtgcgttgtaaccggcatagtcatccgtcaccaacgtgccgcccgaccagtctttcagcaggctctgggcataacggccgctgcggccgggatgcagctcatagtataccactgccggcgaggtatcggggccggtgacagacgtccacaggtaagctcgctgggtctggccttttcccggggccagtatcggcaacggggtctcatcggcatgcagcaccggggacgtcagcagcgtctgcttcagggcatcggctaacggttgcaacgccaccgccacctgccccacccagtccgacagggtgctgcgggccagggtgacaccgctgcgggcatagatttgctgctgacggtagagcggcaggtggtcacgatatttagcgaccaccacctgagccagcaaccccggctctggaaggcccttttcaataagatgggcgggctgggctttagcatgcacacactgacagcgcgcgcagctgtactgcgggctgatatagcgccggacgataaacgtggccggacggtattccagtcgctcactgatttcatcacgcaaaaagcgcagggcatgaccgcaatccgggcagctctccgtctccggcgccagccggatatcttcacggggtaaagtcgccggcaaaggctgacgtttaggctgggccggggtcgcgttttccttgatatgcaggcgtgacagccgggtttccagcaccgcgatatcggtatcggcatcttcctcaaactgactgcgtttgggaccggcaggcagggtttcgctgtgcgcgccaaaacgccagcgttgcgcctgtttcagggcctcttccagctggcgaatataatcaccttgttgctgaagcagcgccagtgcccgcaggcggaactggccggggtcatccagcgcgattaagtcattgagcgtcatgccgacagtgtaccggataattccccgtcgttatccggtaaaagtgtgaccggggtagcggaattagtttcgccagccggacaggtcatctccctcgacctgttgccagtgaatgccgcggatgagccagtcaaactgggcgggcgtcatcacccagctgcgctcgccctgcttcggccagacaaaatgggcccggtgcagacggcgggtacacagccagacgccgtgtcggtcccagcgcaacaccttgagacgggagcgggccttgttgcagaaaataaaagcggcttcgtcctgccagcgcaaattcagcccctccaggtgctgggtcagggcatcaatgccccggcgcatgtcgacgggctctcgcaccagaaagagctgttgcggtttcagcatcgggtcagtacccgcatcacgtcaggcaacagcgtcaatggacaggcgatggcatagccgtctggggtatgcagggtgacggtgcgcgcgtcgtcaggctggagtgaaaccggtaagagggcgggcagtgtctggctgagaggttgggggatgttgttactgtcggcaatccagtcgcggaaagcggaaaaactcagctgatgctgttcgcaatactgttttcgggtcaggtcactgtggcgccattgggtcacatggtgttgtttttgttccggggtatatcggctacggctcatggtgtcagtctccaggtgaagataaggaagcggtagcgtgcatgggccggagaggaagaacaaggtgagatgaccggacgtttacgcagtactgacctgttttcaccgcgtgttgctgttgggatttcagggaaagtgtcaggaggatacctcattgatacgtgaacaactggtgactcgcttgagtcaacaggtcgtacctttcggcacggctcagcaatcaccggtgttaaccaatgtgccattgtcccatctcaggctacgctccatcgtcggccaactagccgtggcgatctctgggatggtcatcgtgttgttcggtgtctggtgggggttaggtcactatctggcaacgctatttccggggttggcgagatgagtgtcatgttgcgacgggtgttatggggatggggggccgggctggcgctgctgctctgtctggtctggttgcccttatcgccggtgggccggtgggtgggggcagtcattatcctgctctgtacgctgatggggctgttttatcgcgggcgttctcaacggcgagagcgccttaacagcctgtcagcggtactgccgcctgaaagtaatcgcctgccggtggtgttggtatatagcgacattcaggacagcttgtttggtaatgaactgttgcgtcagacgccacaaggctattggttgtgcttaccgacagggacttctctgtctgacgcgatagttagcttgctggccgcccggccctcttggggcggtcagttaagtgtgatggcggtgataaacccgcagcaataccgtgacgccgccgtactggctggttgggtgcgagaactacgctggcagttatctcaagcgcgtcaacgacatgctatcccgctgcctttactgctagcgggttacgtagccgggccgtcccgacaacctgacgattcaccgtggtttgagtggcaatcaggacgaaccacggtaacggcttggcgcgaaggtgcctcttttcaaccactcgcggattggttggaacagggcacgctggcagaacagatggcacgttttcagtgtggggttgagttgactggctgggctgattggatgaaggcgcatgtattgcccgtctgcctgaccccggaagatggcttatctccttgtccgccgctggcgatggtattgaagtttgtaccggcattaccgcattgggtaaccggccatgtctggcaacagtggttacaaaccaaaacggcgctgaacagggcgggcgatccgatagccacatcggctaccgctacattgccattcccggacagtgtagtgcggctgctgcccaccagtgcgctacaaacagcgctacagcgggccgtggggatagctctggggctgtttctgctggcgggcataacagcgctaggttgctcggcctggcataaccgacagttattgcgtcaggtggagagtgacctgctgcattaccggtctattgccgcgacggatgagagccgcaaggcacaggcggtggcggtactgagggatgatgccgatcggcttgagaagtatcaccgggatggcgtgccgtggcgtctgggattggggctatatcaaggagcacgattacctccgccattgcatgcggccattgccggttaccacgctaaaccgagggagaaaacgccggtaacgccgggggaaccacagaccatcagccttaacagtctggcgctgtttgatgtgggacaggcgaaactgaaagcgggttcgaccaaagtattagtcaacgcactaatcaacatccgtgccaaaccgggctggatgatcctcatcgccggacatactgattccaccggtgatgccacgaaaaatcaggtgctgtcactggcacgcgccgaagcagtacgcgattggatgttacaaaccagcgacatatcgccggcttgcttcactgtacaaggcaagggagcaacgagtccaattgcgactaacacaaccgctgcggggcgagctgccaatcgcagggttgaaatccgtctgataccgcatgtggccgcctgtgcgcgaccgcagaaagtaccggacaccttatcaacaacgtcgccgctaccggcgacatcacttaagtaacaattaggagtaatcattatggcgattcccgcttatttatggctgaaagatgacggcggtgctgacatcaagggctctgtcgaggtacggggccgggaaggtagtattgaaattgtggcgttggaacatatgttgcacatcccgacggacaacaataccggcaaactgacggggacccgtgtgcatgccccattggtattcaccaaagaggtggatgcatcaagtccctatttgtataaagcggtcaccaccggccagaccctgaaatctgctgaaatcaaatggtacaacattgacgacgcaggtcaggagaaagagtacttcatcacccaactggacaacgtgaaggtggtgaaagtggcaccgctgatgcatgacatcaaagaccctaccaaagagaagcacaaccatctggaacgcattgagttgcgttacgaaaaaatcacctggacctacaaagacggcaacatcattcatgctgatgcgtggaatgagcgcacgacggcgtaacaagcttggcagacggattaatccgtctgctgttgtttcattttttgcgtaattgcgggggcgggaggccccgcgataaaaaactgaaaaccagataaatcatgaccttatgggcctcggtatacggctatgggcggtagcgtacccgcacgactgaggaataatcgggagaaaatatgacgaacctaacaccgatgatcatctttgatcacagccgttacagactaaaagtgtggcgcaataaagcaccgctggatgtgctggcctttaccggacaggaagccttaagccagccgtttcgctatgccattgaattcaccagtgcggagaaagggattgaaccggcacagatgctgatgcagcaagcctcatttaccctgacctcgcctgcgatcaatccggggatacggtggatgccggttgtgccgccggagccgctgcgctcggtttacggggtgatcagcggctttaaactgctctccacttcgcgggacgaaagccgttacgaagtgacgctggagccccggctggcgctgctggcgagaagccatcaatacgctatttaccaaaaactgtccgtgccggagattgtggagaaaatcctgcgggagcgacatggttttcgcgggcaggacttcctgttcagtctggcgtacagctacccgaggcgggaacaggtgatgcagtatggcgaagatgacctgcgctttatccaacgcctgctggcggaagtgggtatctggtacaaagtgacggcggatgaccggttaaagatcgatgtggtggagttttacgacgaccagcgtgactaccagttcaatgtctacctgcctgcccgcaatccgtcaggtatgcacggcgaggaggacgcggtggtgtggggcatggagaccgcgtatcaggtggtggaggggaaaattacgactcggaattatgactaccacgatgcccggccgtatcccggcttgaacaccgaggaggatgtgacacggggcgatcgaacgacttatggcgaagcgtaccattaccgtgacgactaccgaatacccggtgatcgttacgcctatcaaccggagacggaaagcggggtgttttatgcccgtttgcatcacgaacgttacctgaatcaacgtattcgcctgcggggaatgaccacttccgctacgctggtgccggggcaggagttgaaagtgaaaggtgacgccccggaaacgtttcgcaaaggggcgatcatcacccacatcaccaacagtgcccgccgggacagcagttttgagatgacattcacggccattccctattccgagaccgtgtgctttcgcccggagcgggtgccgaaaccggtgatggccggcacgatacccgcgcgggtgagcagtaccaaagtgaatgatacctacggcgatatcgacaaagacggcttatatcgggtggcgtttaactttgaccgggagaaatggccgcaaggcggcgaaagcttgtgggtgcgtctggcgcgcccgtatgcgggagagaactatggctttcactggccgttgctggaaggcactgaagtggcgatcgcctttgaagggggcgacccggaccggccctatatcgcccacgcgttgcacgactcagtgcacccggatcacgtcaatctctacaactacaaacgcaacgttctgcgcactccggcgaataacaaactgcggatggatgacgaacgcggtcgggaacatatcaaactgagtaccgagtacggcggtaaaagccagttgaacctcggtcatctcgttgatagccagcgcccacacccagataaacggggagaaggctttgagctgcgaaccgacgactggggagcaatccgggccggtaaggggttgtttatcagtgcggataaacaggcccgggcgggcggcgaggtgctggcgatggaggcggcgctgaatcaacttcaacaagcgcagaccttaaccgaggcattatgcggcgcggctgaaatggctaaagcggaactggcggatttgcagcaacagaaggcgttgttaagtgaaacattagccgagctgaaaaaatccgcgttgttactctccgcgccagaagggatcgcgcagacgacggcaaaaagcctccagttggcggccggggaaaatattatcgccaccagtgggaaaagtaccgatttcagcgtattgaaaaaattcacggtagcggcaggtgaaaggatcagcctgtttgcccaaaaactgggcatcaaactgtttgccagcaaaggccgggtagagattgaagcgcagggtgatgagatggggctggcggcactgaaagatatcacggtgaatagccatgagggcaaagtgatcatcagtgctaaacaggagattttgttggttagtggcggtggttatatccgaatagggaatggtcaggtggagtgtggtgcgcccaatcacatcatccaacgggcggcagtgtggcagaagtttggcgggcagagtgttagtcagatggtttcccaacgtgaaacagtggatttttccgtcacaccgcaggtgctctggccttttgatgatatgccggtgaaggatcaacatgcctttttgcacaatcatgacgatagtcagcactcttcgataacgggtgcagacggtaagacggctaaacagaagaaattgggtgtggaagcaataaagttttatttaaaagaaggtaaggagtgattatgactgattcatcagaaaaagtggttgtttatcctgtttatgatgagcatggcaggttgtattacccgctagtgagtgcgcccagccataaggacctgacggcgatttgctataaggtgcctaaccgggtgatcccagtgatttttctgcccggcgtgatggggagtaatttgcaagatcaatatggaacgtcagtctggcgtttagacggcatatcgagcaccttggaatggtttattagaggagcagaaacacgaaaaaaattgcttgatccggaaaatactgtggtcgattcgcgtggaaaggtagatgacaatcataaagaaggccccaaatttccttctcgtcaagagcgaggttgggggcaggcatcttatatgagttatggagaatttttaccctggctccaggctgcgttggatgatcaggatgagttattgtttaaccggttgaataagacaggagaactgaccctgcgccagaaactggagtttatggatctacaggcggaaacgggggaagaaaagcttttatcgaaagagattaaactgagttatcaatatcagtttccggttcatgtcatgggttataactggctccagtctaatgcggattccgcaaatcaactggctgagcatcttattgatattattacacactataaacagcgtggtcagccctgtgaaaaagtgattctggtgacacactcaatggggggactagtggcgcgtcactattcagagaaattggagggaagtaagaaaatattaggtattgtacacggtgtcatgccgacctatggcgcgccgacggcttataaacggatgaaagcgggtgaaggggggggagtcggactggttatcggcagtaatggcgccaagatgacgccagtgatggcgcaatcaccgggaccacttcaactattacctagtttgagatatggcactgggtggttgcagattaaagatggtaagacactttataccttacccaaacgcgatccttatgaagaaatctacttgcaacgtgataagtggtgggggttatgtgaagatcgtctaattaatccgaccaatgagaaaagaaatccggtagtaatgcaggcagattggaaaaaatatactcatatactgtctcgtgtagtccaaccttttatcgaagagttaactggttgttaccacggcaatacctatgccttttatggtaacagtaccgaacacctctcttacggcgtcgtgaggtggactcgtagaagttatgttgaccggggagatgatcctaatctggcatttaatagaccggtatatgatccttttaataatcacctttccgatacacgcatggtgggatattccctcgacccaaacaaacccgatgaccatagccatttaagagcttttattcttgaaaagccgcagcaacccggtgatggaacagtaccggtgcagggtggaaagtttaccgctggagggctgcgttcaatattgggagcggaggttgatcatgagcatgcctataatactgataaaacccgtttttttactctgcgggcaattatcaaaatagcgcaattagttaaacaaacttccttggcttatcccgatgaatagaaaaagagtattaatcattattgcaattgtcagcttgttggtggtggtgttttacgggttatggcaacagttacagccttatccccctcatactatgttaaatcagaaggaaaaattagccgtggataaattattaacaaacttacaaacccgttgtattggccgatatttggttgatttgccagcggactacaataacactgtaaatatggctagggtaaatgatagttgggtagagactcaacggctctatttacctgcttttgaacagcgtattcagttacgggaagaagcattacggcaaacaaaaacagtgaatccggttaatatgccctatttgaaaaatatctaccgcttacctgagggaatgcaagggattatttttgaacgtgtgcaagatcagagtgtatcggatgcagcccgagtattggaagctcatttgtacaataatggtgtggcgattaaagtagaaatgaaagtttcaaatgcttctgctgcacgttatgacaaagggaggcaaacttttcctgatatttatgataatgatgtgccagagaaattggttgagctgaaaaatttattatcccgtatacaaggacgtaaggagacggaaatacccactaccgctgggagttgtattcccaatgcgtttattatcgataatcacagggataaggaagatattggttcattatataaaacgaacccggataattatttgaatgtgaggatacagacggataactttatccgggaaaaagacagcatgctggaacgcctcggtgtaattaaagcgagtctgtatcgaggcagcattttccgtaaaggagtgaggaaaattaataagttggataccgaagagttgctgttggtggggcagcagccgaatagtgatgatcctcgttatcagtttacattactgacaaatgaaaaaactggcggaaaggaaacaccggtgtttgatttaacggtggttaatgatgaagaaacaccaacagcctatactcagaatgaaatcgtggcattttgggatgcgattagtcagaccgtcagggttagacccggtgcttttaaacggcaataacatgcttcaaataaaaccccttatagggatgtaagggttaataatcggaatggagaaagaagagcagatacgagaacagcgattttacgttctgctattgaaacagtacaggcggtgaaaattgaataggaaaacgaccttactgactttagcggttatttataccttgtggtggcatatgcctgtattttattacccgattttaactgaaaaggaaaagaaaatgacaactgaaatgttatcaaatatgcagacccgctgtgtgggccgttatttgatagatcttcctgctggatttgacaatgttgccgatcgagggatatttattggtgatgcgcaaatagaaaccgagcgtttatatccacctgcatttgaacagcggatacagttaagagaacagaagttaaaggaagctaaaactattgatcctaaagatatgccctttttgagaaaagtttatcgccttcaagataatttgaaaggtgtgattttcgaaaaaaacgaagatattgacattccgagctatgcgagggtattagaagctcacttatataacaatggggttgcttttactataacaatgaaatttatggatttgtctgatgaaaaatatgctcgtgatagagccggttttatcaaagatggtttttctgaagataaattaaaggctacagatagaacgatgatgaaaatgaggaacttattatccagaatcagcggccgaaaagatacagaaatacctacagaggcaggtacttgtattcctgatggttttattactggcagtcgtgatgagaaagaaaatatgacctttatctatgagcgaaatgaaagtgatcattttacttttagtattgagatattgaatgatcttcaagagaaagaccatatgttagatcgtattgtcagtatggaaggtgtattactggctatgcatactaagctaataaggaaaggaaaacgggaaattcatggcacttatacggaggaaattttagcaaaagtgccgacaaaagtcatcgatcaaccggaaattgaaatcccgggatatgcatttaatttgattgcaaatgaaacagccggtgattataagaatccttttgttaatatcgaattagtgaatgatcggtcatccgcaacgccgtacagtgaaaatgaactgataacgttttgggatgcggtaacgagtacttttcgtaaaaggcccggcgcttttaaacggcaataacatgcttcaaataaaaccccttatagggatgtaagggttaaccgttagcggaaggagaaacccgatgtttaaagaaataaccagttagtggggttcgatgtgattagttttggtttttggggcttggcattatacgcctatgttttcttattattctacacctggccgataattgtgatgcttgatgtatctgccatttgtcgaataaagaaatgcattaaagataagaaatactggcgtgcgtcattcttgatttttgccgctgtattaatgagtggctcccttatcttcttcatggtatggataggtttatatggttaaacggatgaggagataattatgtttatcagtcatatcactgatcaaagtagaatcgtaagcgtgacagcattaacgttctataataaagacaaaccggttaaattaatcggtggcctgattttttatttaaacgcgaaacagggtatacattcaatggtgatatatgattgttgttgcccgttttcgattccattccccagaataatatcgagctattattatgagttggcctattcctgaaataccggaacttaaagtcgtggcacctttgcgttatcggttatggtttatcattttacttttgatattgattgtcggcacattggtttacgctgtgctaaaagataccactgatttctattacgcggcgatttatagcagtttcccgtcctttctggtgtggctgctgttatttggtgcggtattaaatcgctatgagcaatattgtgcggcagcatacgcttgggaagaagccagtgccgaaacccgtttccaatggcagcaatggagcagaaaacaactggcggtgattggtaatattattctgacgcctgagcaacaaggtattgcgccactgttaggtgatgcggaagagatccctgcttttcctgaacaaggacgggcattatctctgccatcgagcgataggcggcaattattggctaaaatggatcaggattttgaacaacagtgtccgggttatcgttctcttttacgccagatttatattgcttccgacgatcacgcttcttatgaatctgcgatatatcaacagtggaaaataagcatcttaccgataataaaccgagatgagatcgataaattatacgatgaggatgatttcgaagggctgataatggttattgcgttccagtgctggccttctgaaaataataagaaagcgtacagtgaatttgtctcggctcaattattttcgtcgacaaaatttgccacgcaggaaaaacttactgtccttgccggtatgggaagaacattaccttcattacccggagaaataatcaaagatttacagatattgtttgaatataaccgtattgataaaaataacatgcggcacctttggataacgggtgtcacgaatgatgttctgactgaactggcaattaacagtcatgattctgcgtttaatcttttcaccgaaaattcggttcatttaatcgatcatacttttggtcctccggggccgctatcgatatttttggcatcagccatgttaactgaggcaattagcctgaccggtagcgatcatatcgttatcaatcaattaccagaggggagcgctagcctctatttaatgactaaggaattacatcaatgaaagttaatcgtcaccaccaatatggctattttggatatatttttattacccttagccttgtcgggatatttctcatgttgatctacttgaataaaacattacttgaggaacgggggctgcttaaatccgcattgtatgcctacgccacagtttttccgctcttattaataggcttatttagcaatgctgtctggtggcatattcggcagaataaagcgcagaaaaaactcagacctgaaaccgagcggacagcggatcgctccagtcagtctgctttggtactgagtgacttgggcgatcgcatgcgcctccgttacgggcggttctggtggtataaagtccgcattttactggtggtgggcgaagtggagcaggtggaagccatcgcgccggggctgaccacgacgcactggctggagggttatcgcacgctattgctctggggcggcagtttgcaagcggaaccgaataccgctcaattgatggccctgcgtcgcttgcgccgttaccgcccgctcaatgccattgtctgggcgctgaccgaaaaccaaagtgcgcagccggtatggatggataaggccctgaggatgttgcaaaaacaggcccaccagttgcgctggcaggctccggtctacctgtggcaggtgtgtcacagtacctggtctcaggaaggtcgtatcactcagaccgtcggctgcttttttcctgaacgctgtaccccggatatcgtggcgacacagttacaaacgttggttgacccgttgcgcgagcgcgggatgcagcaactgttggagaagacggcccacgattttctctgtcgtctgtccgcgaacttgaaacaacaggggattgcgcactggcaacaggtcctgacgccgtggttagcggagtatggtgatgtggtgtcgctgcggggtttgatgttcagtttgccgcttaaagcgcagacgactcgcctcccgcagatctggctgcccgacacggcatggcagggggtgttggagggcagtcgttgtttccacggtcggcgggtgggcatgctccacacacagaccgtttgtcgtggcctgatagtgctgggcttgttatggggtgccggaatggtgctctcctttttcaccaaccgtgaccagctagccgtggtgcaggcggcggtaactgacctgaaagtccagccggagaattctgatgcccagttgatggccttgaaggatctgcgtaacgaggtggaccggctgcaagaccgggctgaacacggcgtgccgtggtatgagcgctttggtttgagtcagaatcagaaactgttgacggcggtgctgcccgattatgcgcaggttaataaccgcctgatacgggacaaagccgctgcggtgttgcatgcgaaactgagtgcgctggtgaatttaccgccgggcagccctttgcgggctaagtgggcgcaagccggtcatgaccagttgaaagcctacctgatgatggcgcagccggaaaaagtggatgctgtgtttttaacccggatactggatgaaaatgaacccgagcgggccggtattgcccccgctgtctggctggatatggcgtgggatttgtggagtttttatgcggagaatctggccgcgcatcccgaatggcggataaccccggataaggcgttgattaaacaggtgcgtcagttgttgctgctccagctaggtaagcacaatgccgaagcggcgctttaccagcagatgctgcaatcagtggagaaaaattattcggacctgacgttaaggcagatgaccggcgacaccgatgcggcgcggctgtttaccacctctcacgtgataccggggatgtttacccgtcaggcgtgggaaggcgggatacaaaaggcgatagcggaggcggtggcgtcacgtaaagaggcaattgactgggtgctgagtgataaccgtcaggcagtctcggcttcggtatcgcccgaagagctgaaagcccgtttgaccgcccgttactttaccgattttgccggggtgtggcaggattttctcaacagcctgcgctggaacaaaacccgtaacctgtcggatgtcatcgatcagttaaccctgatggcggatggacggcagtctccgctgattgcgttgatgaacacactggcctatcagggcgagaccgggcaacaggggccgagtttatcggactcgttggtgaaatccgctaaaacgttattgaataaaaaaacgccgcgaatgattaatcaacagacggctggcttgcacgggccgatggatgaaacctttgggccgttgctggcgctgatgggagaaaatcaggcagaaggaagaatcaaggcggacagtaccctgaatttacaaaccttcctgacgcgggtaaccgatgtgcgtctgaaactgcaacagatgaacaacagcgacgacccaccggcaatggcgaatgcgctggctaaaacggtatttgaagggaaaagcactgatttgaccgatactcagggttatgggcgcttgatagccgccagtctgggcggccaatggcggagttttggtcagacgctgtttgtcgagccattagcgcaggcgtggcagggagtattgaaaccggcgacggcgaatctgaatagccagtggcagacggcgatagtggacaactgggatcgggcatttgcgggccgttatccgtttgccggtggcgacagtgaaatttcattgccgatgttggggcaatttatccggtcagattcagggcggatagagcagtttttgacgcgtcagttaggcgggatactgcataaagcgggtaaccagtgggtagtggatgaggtgaatggtcagggcgtacagattaacccggattttctaaaggcgataaatcagctcagtcagttatcggacctgttgtttgcggatggcagtcagggattgcggtttgaactgcgggccagagcggtgcgggatgtggtggaaactgacctgacgatagatgggcagaaactgcgttattttaaccagatggaaagttggcagagctttcgctggccgggagagacctataaaccgggtgtgatgctgacgtggaccagtgtcaatgccggggcgagattgtttggtgattatcaggggaactgggggctgatccgctggctggcacaggcgaaagcggagaggctggatgaaagccgttaccgactaatatttaccgcgccggatggattaccgttaacctggattttgcgcacagaattgggcgaagggccgctggcgttattaaaactgcgcggatttaaattgccgaaaaatatctttgtagtgacgccgggtaatcacacgacaatatcagcggtaaatgacgatgatctgataacggaatagtgcatgcgattggcgataaatgaggaaatagcgtaaccgttaactgctttcattaacaaaatagctgtcagaatgaatatcactacagatattccgattaagatgtttggctatatgggtgagaagcctgatttcacttttctcagtgaagaggcaatattgctatggggttttcttgatgttattggctatcttattattcgtgtggcatgaatgagaattattcttctttatcgtgatggagtgaataagatttaaaaaggagtgatgagactgaaacagcgataatctattagataaaattaaaataggcattattatcatagggatgtgattaaaattgcgtattcaggccgccttcattttatggaaaataatgttagtttacttttgtcaataaatgtcatgttattgtcatgaagtttaaattattctgttcgacatgctgttatatcggcggagataaaagggtgcgcattaaaaatcgtttttttgaaaaaagagttgatctttataggcacccattaagaagatgggagaatttataaatcgcttgccttgttcatcccttgatatattgcgaaaacatgaatggcctgtgtaaatatttacggctcagttaacttccgaccgggaaatagtggcgtgggttatttcccggtatgacaataatgatatggcctgatattgagttcttattgttgactaatggccgcagaaaatttaggagaaaatatgacgaacctaacaccgatgatcatctttgatcacagccgttacagactaaaagtgtggcgtaataaagcaccgctggatgtgctggcctttaccggacaggaagccttaagccagccgtttcgctatgccattgaattcaccagtgcggagaaagggattgaaccggcacagatgctgatgcagcaagcctcatttaccctgacctcgcctgcgatcaatccggggatacggtggatgccgattgtgccgccggagccgctgcgttcggtttacggggtgatcagcggctttaaactgctctccacttcgcgggacgaaagccgttacgaagtgacgctggagccccggctggcgctgctggcgagaagccatcaatacgctatttaccaaaaactgtccgtgccggagattgtggagaaaatcctgcgggagcgacatggttttcgcgggcaggacttcctgttcagtctggcgtacagctacccgaggcgggaacaggtgatgcagtatggcgaagatgacctgcgctttatccaacgcctgctggcggaagtgggtatctggtacaaagtgacggcggatgaccggttaaagatcgatgtggtggagttttacgacgaccagcgtgactaccagttcaatgtctacctgcctgcccgcaatccgtcaggtatgcacggcgaggaggacgcggtggtgtggggcatggagaccgcgtatcaggtggtggagggaaaaattgcgactcggaattatgactaccacgatgcccggccgtatcccggcttgaacaccgaggcggatgtgacacggggcgatcgaacgacttatggcgaagcgtaccattaccgtgacgactaccgaatacccggtgatcgttacgcctatcaaccggaggcggaaagtggggtgttttatgcccgtttgcatcacgaacgttacctgaatcaacgcattcgcctgcggggaatgaccacttccgctacgctggtgccggggcaggaattgaaagtgaaaggtgacgccccggaaacgtttcgcaaaggggcgatcatcacccacatcaccaacagtgcccgccgggacagcagttttgagatgacattcactgccattccctattccgagaccgtgtgctttcgcccggagcgggtgccgaaaccggtgatggccggcacgatacccgcgcgggtgagcagtaccaaagtgaatgatacctacggcgatatcgacaaagacggcttatatcgggtggcgtttaattttgaccgggagaaatggccgcaaggcggcgaaagcttgtgggtgcgtctggcgcgcccgtatgcgggagagaactatggctttcactggccgttgctggaaggcactgaagtggcgatcgcctttgaagggggcgacccggaccggccctatattgcccatgctctgcacgactcagtgcacccggatcacgtcaatctctacaactacaaacgcaacgttctgcgcaccccggcgaataacaaactgcggatggatgacgagcgcggtcgggaacatatcaaactgagtaccgaatacggcggtaaaagccagttgaacctcggtcatctcgttgatagccagcgcccacacccggataaacggggtgaaggctttgagctgcgaaccgacgactggggcgcgatccgggccggtaaggggttgtttatcagtgcggataaacaggcccgggcgggcggtgaagtgctggagatggccccggcaatcagtctggtaaaaggtgcggtgaatcaggtgctggagtggggaacagtgaccaaaactcacctgaatcatcagccggatactgaaagcctgaaaacctacttacagcatgtggatcaactgaaaatggcggccatgctgctcagtgcgccggaaggggtggggattgtcagcccgcagactgtgatggtgcaaagtggtcaggcgctctatgcccaaagtgcgggggatgtgcatattgccagtgcaaaccggattgggatgaattcgatacaggctatctccctgttagcacaaaacgaagggatgcgtctggtgtcagggaaagggccgctcgccattgaatcacatggcgatagtttaggtctcacctcattaaacgatgtcaccgtcaattcaacacagggtcacgtccagattacggcgaaaaatggcctgacattggcgtgtggaggcgcgtacatccgtctttctccggcaggagaaattgaaattcacgggccgggcctgttaagcctgaaagggcagcacaaaatggcgtcaccggcgaaacaggactttcctttgcctgacctgcctgaatcggtgtgtaaaacgtgtttggaaaaagcgcaggaattgtcgcaggggtttgttttgaggagttaaccaatgaatgaccatcaaatagctgactggattgcatcacttgcatcgtctgtaacggaaaccggcataagttgtatcgatatgattgtggatcaatcagggggtaagttccccctaattccggcattaaaaagtttttcatctgagatggattggtgctcgctatttcagggattgccggaggagattgtgacagataaagccccgatcttaattcggattgatctaacacaacctgttcaacggcaatggatgaatgaaatcatgatgcgcttaggcggcaagcctatgttgctgattttatgttcttcatggtcgtttgatcgcttgtcccaatatttgattcagtgcgtggatgcagcctacgccgagaaaggcgggatcttacgtttttatgatccgcgtatttttcctgtgttgttttcccatgtattggacaaggaacagcaacaacaatttttcaggcccgcgctgttctggagttggcttgatcgtgatggggctccacatgttatctggcgtgaaggccatgcagggccggttgatgaaacctttcagaaaattgatctcacagatgagcagctagaacatctcttgtgcgtttctgatgctcacatactgatgttgaaactgagtagtcaggttgaatattcagaattttcccgcgaacaactgttcaacaattgttatgccttgatgatagagacatctggtgaagacattttactggatgacgacagagagtcgttcgtacttaaacaccttaaagccagattatcgtcatagaggtagaagatgaaaaaacaacaattgaggctggcggttttattcctgctgctggtcgcctgtagccaatttccggcacaggcaggcatcattatcgccattaatcgtactaaatgggcgattaaccggttcactgtggatgatcaaccgggtatcgacagtatcggcccgtatcagggcggtggtggcggttgctgctatcgggctccagataagtggcgaccggggatgacggttaaggtggattgggagaccggtgtcgctttttccgacgactttcccggttatgaaaatgatgagaagtatttggcgtggagggacaagattaacgcccagaaacgccagcatagccaagtagtgccggttccttattatcagaatggtggtgatacctgcggtattacggtgcacttcctaccctgtgatcaaattaaagttacgacctcgtgttatgcctacggtagcccgaactacccgattaaagaacccttggaaatgaaggaaccaaaagtatgtccgaagtaaagcatgcaagcacctcaagtccagattgtcactaatgtgaaggtatagaagatgaaaaaacaacaattgaggctggcggttttatgcctgctactggtcgcctgtagccagttttcggcacaggcgggaatcattgaagcgattaatcataccaaatgggcaattaatcggttcagtgtggatggtgaaccgggtatcgatattatcgggccatatcagggcggtggtggtggttgctgctaccgggccccggagaagtggcgaccggggatgacggttaaggtggattgggagacaggtgaagcatccacaaaaggctttccgggttttgctgatgaagagaagtatttatcttggcgtaataagttgcgggctaatgatcgtcagcatagcaaggtagtgcctgtacccgattataccgggcagcgtacctgcggtattacagtgcacttcttaccctgtgatcaggtcaaaattaccacttcctgtaacacctacggtagcccgaactacccaattaaagaacccttggaaatgaaggaaccaaaagtatgtccgaagtaatgcataccggcatttcaagtccagattgtcactaatgtgaaggaatagaagatgaaaaaacaacaattgaggctggcagttttatctctgctgctggtcgcctgtagccaatttccggcacaggcaggcatcattatcgccattaaccatactaagtgggcgattaaccggttcactgtggatgatcaaccgggtatcgatattatcggcccgtatcagggcggtggtggcggttgctgctatcgggctccagataagtggcggccggggatgacggttaaggtggattgggagactggtgttggggacatgggggggtttcccggttttgcagatagaaaaaaatatttggcgtggagggacaagattaatgcccaaaagcgccagcatagccaggtagtaccgttgcccgattataccgggcagcgcacctgcggtattacagtgcatttcttaccttgtgatcaggtcaaagttaccacctcgtgtaacacctacggtagtccgaactacccaatcaaagaaccgttggaaatgaaggaaccaaaaatatgtccgaaataaagcatcatgatcttgtctggttgccagccccttttccgtctcaggggcggttacctgccaaaaattatttggtggtggaaaactgtcagcaacagagcagtcaggaaaaagcttactatcaggaactttgtctggccgccaatcgtcgggtaatccgtccctgttgtaacacgttgcatgtcagcctgttttttgatggcaccggcaataatttatataacgacctttatcaggctgttcctaaccatccgaccaatgttgtccgtcttttccaggcaaccattggggcgggttatgccggaggggcatcaggtaagccgttactggataatattgagagcaccggaagaaagtactttaagtattatattcccggggtgggaacccctttcccggaaattaatgagctggattacagcaaattggggctggcggttgctagcgggggagaagaccggatcaattgggcattactgcggttgattgatgtattaaagcgcgtattggtaaacgacacaattgatgatgttgcttgtcaaaaatccctgaaagcgatggcaaccacatggaatatgctggagttgggaggcagcaataaccgctatgaggagttttataagcagtttgcgagcttaaaacgtgaactgaggatagcccgcagtcagccgggacgaggtaagtgtaagttgttgggcatgaaattgtatgtgtatggtttttcccgtggggctgcggaagcgcggacttttgttaactggttgactgaactgtttccgccgtcgagagaagcaggccagaaaccggctcagtgtctgcaacataaacacgagacagacccggatagcaagttacccatcagcgtagaatttctcggattgtttgacacagtggcatcggtcggggtgccccatatgatccccgttgttgaaggtcatatggcctgggcagacggcacgcaggaattgccatcggaggcgacttacggtggtctggtgaaacgttgtgtgcacttggtctcgacccatgaacagcggttgtgttttccgatggattccattcgccgttccgatggcacttacccgacaggcagcaccgaggtgatttatcccggtgtgcactctgatttggggggcggttatccaccgggagaacagggtaaggcaataggaaaacgtgacaatctattactctcacagatctcattacatgaaatgtattcggcagcgtttgagattggagctccattgaaagttcctaaagatattttgccacaagagttatctcaatatagctggcgttctatgccaccagatgtcggtgatgaatttgatattgacacacaattagtcaaccgcttcaacgcctggcgtcaggtcactctggggttggagatgccccaacaacctctgtcggatgaagaagcggcccgctttgaaccggtgcgggcctctgtggcattggaacaggcgatgaaaaaccagatggactggctgacagcctggcgtatcaatcgttacgccaacggcacgctgcttggtgagccattttttcatgaggctcctaatcgtgatgcgaaaaaggcgcattatgaacagagtgaacaggcacaaaaagcggcacaacagcaggtcgaggctaaacggaaagtgcagtggaatgaattttttcgcgatggaggaaaaacgcagccgttgttaatgcagggagtgccggattttgacccggaaaccgctcaaaaccagttgcgagaagcggccgcggaatttcgcaatgactactacggtgaccggcgggaacaacacagtaagtggcaatttcttttcgatactgtgccacgtcaggcaatttacatgttggatgatcatgatgacctcctggagtatctgcaaatgaaagcagggggagaggcattggtcaaacagctttttcggcctgttccggcggcaaaacccggtcaacaggaaccacccgagtcattgctggtcgccttgtatgacaatcaggttcacgattcccgtgcctggtttatgtactcgacactcggttcacgtgaaccgtggggaggctatttccgctaccgagtcatttacttcggtacaatttgcagcagaccgctgtcacttctgtcagtggctggcactgtggcggggttcatgtcgccggccgcagagagtgtactgcttttgtttaaacagaataaagtcgcaaacacgatgggggatgccatcgacaaagtgtccaagggcaccgctgctgagtgggaagtgaccgcgcagtatttaacttccggcaagctgatcaccctgttagcaggaccggagtatagaaaagcgttcacccataatgtgggcgagatgaccagccagcagagaaagtttatcgaagagcagcggttgcaaacggccaaagataatctcaaagcgcattgggcgggaaaaacgcaggaaccgaccccgttcaaggagcctgagaaatgaaaaacgtaatccgtcagggtgatagcctgcgcgaatatggcggtacggtattgtcgggccactatctttgtttcggacaacccattgcttgcaagggtgatcctgttcagtgtcaccgtcatggcatgactaccattgctcaagggagtgcggcctgcctgatagacggccagccggtggcgttgcatggtcatcgttgtgaatgtggttgtacgttagtcagctcttttcccgattatcaggtgacgtcatgaaagcgatccctctttttccgccttattgtcaggcttcgcctccccgttttaaacgttggttgggagtcggcaccggattggttttgttgatcagtaacatcgtcgcgctgataagacctgaaatcggtgacactttctccttatatgccctgatccctggattggcggcgttatggctgttatgtctgttatttcgcgtgctgttttaccgctttgctgtgcataacgcctggacttaccagcagcaggtcgagcgggttcagcaacagtggtggcgtaaacaccgtcaacagattgcgttggtggattatgtattagctgggccgctagggtgcacgcccgatgtatggaataaagtggttaatcagcctcattgccacgtggaacctatcgaggaagagagtggtcagtcggtgcgtctgctgcgttcttttgccgctgatattgaacagcgggaaatacaactggcgggcatgtcggtggaacagtggcataaacaaaggaaggcgcagtcgccgttgcgttgtacgccattacgttgttattggttaggctctgtcgctgcctggcaagagtttaccgcccagatggcggagcggtttcctgatgtggagttgcctgaacagccacagccttggtgtggtatcgatacgctggatgaaataattgatttgctcaacacgacaaaggaccaacacgcgactattttgtgtgcaggttgtcagtgcgtagacagcgaggctgagtcagccttacccgccggtgaagcagcatttatctggttattgaaaaaacagggcaacgtctgtttaacccgtggtgaatttttttgttctcaaagtgatgaagaggttgttgacgtcgcggccagaacatgggttcaagcggatatgtctcagccaccggcaacctgctttctgttttctcagccggatatatcctcactggagaaactcggctggaatatcactcaacatcaacaggatctcaattggggcaatattggcgggatggaggcgatcgtagtgcaaacactggcggcgatctcggcggaaaataccggccaaccctgtgggtggttagcccgtgatcctcaacatactttagcgtttggaatagtaaaatcttatggcactgcaagagaataaaataccgcctatttcggtggtgaagacacttatcttactgataggcaccattaccctgctggtttcgttggctggtctgggatggtgggtttggggagaacaccgaaccactgatgccgaaactttcaaccatctgttgtgggtttgtggaatagcttgggtgctcactgtggtggtgagtatgctaggttttatcacggtaacgttgtttgtcaaaaacaaagtcaccgatgtgaagtccgatacccggccacttttgccagccagcgaaccgtatgattatggtgatttgggcgatcgcatgcgcctccgttacgggcggttctggtggtataaagtccgcattttactggtggtgggcgaagtggaacaggtggaagccatcgcgccggggctgaccacgacgcactggcaggagggttatcgcacgctgttgctctggggcggcagtttgcaagcggaaccgaataccgctcaattgatggccctgcgtcgcttgcgccgttaccgcccgctcaatgccattgtctgggcgctgaccgaaaaccaaagtgcgcagccggtgtggatggataaagctttgcggatgttacaaaaacaggcccaccagttgcgctggcaggccccggtctacctgtggcaggtgtgtcacagtacctggtctcaggaaggtcgtatcactcagaccgtcggctgcttttttcctgaacgctgtaccccggatatcgtggcgacacagttacaaacgttggttgacccgttgcgcgagcgcgggatgcagcaactgttggagaagacggcccacgattttctttgtcgtctgtccgcgaacttgaaacaacaggggattgcgcactggcaacaggtcctgacgccgtggttagcggagtatggtgatgtggtgtcgctgcggggtttgatgttcagtttgccgcttaaagcgcagacgactcgcctcccgcagatctggctgcccgacacggcatggcagggggtgttggagggcagtcgttgtttccacggtcggcgggtgggcatgctccacacacagaccgtttgtcgtggcctgatagtgctgggcttgttatggggggccggaatgatgctctcctttttcaccaaccgtgaccagctagctgtggtgcaggcggcggtcactgacctgaaagctcagccggagaattctgatgcccagttgatggccttaaaggcgctgcgtaacgaggtggaccggctgcaagaccgggctgaacacggtgtaccgtggtatgagcgctttggtttgagtcagaatcagaaactgttgacggcagtggtgcccgattatgcgcaggttaataaccgcctgatacgagacaaagccgctgcggtgttgcatgcgaaactgagtgcgctggtgaatttaccgccgggcagccctttgcgggctaagcgggcgaaagccggtcatgaccagttgaaagcctacctgatgatggcgcagccggaaaaagtggatgctgcgtttttaacccggatactggatgaaaatgaacccgagcgggccggtattgcccccgctgtctggttggatacggcgtgggatttgtggagtttttatgcggagaatctggccgcgcatcccgaatggcggataaccccggataaggcgttgattaaacaggtgcgtcagttgttgctgatccagccaggtaagcacaatgccgaagcggcgctttaccagcagatgctgcaatcagtggagaaaaattattcggacctgacgttaaggcagatgaccggcgacaccgatgcggcgcggctgtttaccacctctcacgtgataccggggatgtttacccgtcaggcgtgggaaggcgggatacaaaaggcgatagcggaggcggtggcgtcacgtaaagaggcaattgactgggtgctgagtgataaccgtcaggcagtctcggcttcggtatcgcccgaagagctgaaagcccgtttgaccgcccgttactttaccgattttgccggggcgtggcaggattttctcaacagcctgcgctggaacaaaacccgtaacctgtcggatgtcatcgaccagctaacgttgatggcggatgggcggcagtctccgctgattgcgctgatgaacacgctggcctatcagggcgaaaccgggcaacaggggccgagtttatcggactcattggtgaaatccgctaaaacgttattgaataaaaaaacgccgcgaatgattaatcaacagacggctggcttgcacgggccgatggatgaaacctttgggccgttgttggcgctgatgggagaaaatcaggcagaaggaagaatcaaggcggacagtaccctgaatttacaaaccttcctgacgcgggtaaccgacgtgcgtctgaaactgcaacagatgaacaacagcgacgacccaccggcaatggcgaatgcgctggctaaaacggtatttgaagggaaaagcactgatttgaccgatacgcagggctatgggcgcttgatagccgccagtctgggcggccaatggcgtggttttggtcagacgctgtttgtcgagccattagcgcaggcgtggcagggggtattgaaaccggcgacggcgaatctgaatagccagtggcagacggcgatagtggacaactgggatcgggcatttgcgggtcgttatccgtttgccggtggcgaaagtgaaatctcattgccgatgttggggcagtttatccggtcagattcagggcggatagagcagttcttgacgcgtcagttaggcgggatactgcataaagcgggtaaccagtgggtagtggatgaggtgaatggtcagggcgtacagattaacccggattttctaaaggcgataaatcagctcagtcagttatcggacctgttgtttgcggatggcagtcagggattgcggtttgaactgcgggccagagcggtgcgggatgtggtggaaactgacctgacgatagatgggcagaaactgcgttattttaaccagatggaaagttggcaaagttttcgctggccgggagagacctataaaccgggtgtgatgctgacgtggaccagtgtcaatgccggggcgagattgtttggtgattatcaggggaactggggactcatccgctggctggcgcaggcgaaagcggagaagctggatgaaagccgttaccgactgatatttaccgcgccggatggattaccgttaacctggattttgcgcacagaattgggcgaagggccgctggcgttattaaaactgcgcggatttaaattgccgaaaaatatctttgtagtgacgccgggtaatcacacgacaatatcagcggtaaatgacgatgatttgatagaggaatagtgcatgtgattggcgataaatgaggaaatagcgtaaccgttaactgctttcattaacaaaatagcggtcagaataaatatcactacagatattccgatgaagatgtttggctatatgggtgagaagcctgatttcacttttctcagtgaagaggcaatattgctatggggttttcttgatgttattggctatcttattattcgtgtggcatgaatgagaattattcttatttatcgtgatggagtgaataagatttaaaaaggagtgatgagattaaataagatttcaaaatagcgctacatcttataccactcataattctatgtataacaatgggttggatggggctatgtgtagcataattacgaaacgttatttaaaacagcgataatctattgggtaacatgaaaataggcattgttatcatggggatgtgattgaaattgcgtattcaggccgccttcattttatggcaatcaatgccagtttacttttgtcaataaatgtcatgttattgtcatgaggtttaaattattctgttcgacatgctgttatatcggcggagataaaagggtgcgcattaaaaatcgtttttttgaaaaaagagttgatctttataggcacccattaagaagatgggagaatttataaatcgcttgccttgttcatcccttgatatattgcgaaaacatgaatggcctgtgtaaatatttacggctcagttaacttccgaccgggaaatagtggcgtgggttatttcccggtatgacaataatgatatggcctgatattgagttcttattgttgactaatggccgcagaaaatttaggagaaaatatgacgaacctaacaccgatgatcatctttgatcacagccgttacagactaaaagtgtggcgcaataaagcaccgctggatgtgctggcctttaccgggcaggaagccttaagccagccgtttcgctatgccattgaattcaccagtgcggagaaagggattgaaccggcacagatgctgatgcagcaagcctcatttaccctgacctcgcctgcgatcaatccggggatacggtggatgccgattgtgccgccggagccgctgcgctcggtttacggggtgatcagcggctttaaactgctctccacttcgcgggacgaaagccgttacgaagtgacgctggagccccggctggcgctgctggcgagaagccatcaatacgctatttaccaaaaactgtccgtgccggagattgtggagaaaatcctgcgggagcgacatggttttcgcgggcaggacttcctgttcagtctggcgtacagctacccgaggcgggaacaggtgatgcagtatggcgaagatgacctgcgctttatccaacgcatgctggcggaagtgggtatctggtacaaagtgacggcggatgaccggttaaagatcgatgtggtggagttttacgacgaccagcgtgactaccagttcaatgtctacctgcctgcccgcaatccgtcaggtatgcacggcgaggaggacgcggtggtgtggggcatggagaccgcgtatcaggtggtggagggaaaaattgcgactcggaattatgactaccacgatgcccggccgtatcccggcttgaacaccgaggcggatgtgacacggggcgatcgaacgacttatggcgaagcgtaccattaccgtgacgactaccgaatacccggtgatcgttacgcctatcaaccggagacggaaagcggggtgttttatgcccgtttgcatcacgaacgttacctgaatcaacgcatccgcctgcggggaatgaccacctccgccacgctggtgccgggacaggagttgaaagtgaaaggtgacgccccggaaacgtttcgcaaaggggcgatcatcacccagatcaccaacagtgcccgccgggacagcagttttgagatgacattcactgccattccctattccgagaccgtgtgctttcgcccggagcgggtgccgaaaccggtgatggccggcacgatacccgcgcgggtgagcagtaccaaagtgaatgatacctacggcgatatcgacaaagacggcttatatcgggtggtgtttaattttgaccgggagaaatggccgcaaggcggcgaaagcttgtgggtgcgtctggcgcgcccgtatgcgggggagaactatggttttcactggccgttgctggaaggcaccgaagtcgcgatcgcctttgaagggggcgacccggaccggccctatattgcccatgctctgcacgactcagtgcacccggatcacgtcaatctctacaactacaaacgcaacgttctgcgcaccccggcgaataacaaactgcggatggatgacgaacgcggtcgggaacatatcaaactgagtaccgagtacggcggtaaaagccagttaaatctcggccatctcgttgatagccagcgcccacacccggataaacggggagaaggctttgagctgcgaaccgacgactggggcgcgatccgggccggtaaggggttgtttatcagtgcggataaacaggcccgcgcgggcggtgaagtgctggagatggaggcggcgctgaatcaacttcaacaagcgcagaccttaaccgaggcattatacggcgcggctgaaatggctaaagcggaactggcggatttgcagcaacagaaggcgctgttaagtgaaacgttagccgagctgaaaaaatccgcgttgttactctccgcgccagaagggatcgcgcagacgacggcaaaaagcctccagttggcggccggggaaaatattatcgtcaccagtgggaaaagtaccgatttcagcgtattgaaaaaattcacggtggcggcgggtgaaaggatcagcctgtttgcccaaaaactgggcatcaaactgtttgccagcaaaggccgggtagatattgaagcgcagggtgatgagatggggctggcggcactgaaagatatcacggtgaatagccatgagggaaaagtgatcatcagcgccaaacaggagatcttgctggtcagtggcggtggttatatccgaataggaaatggtcaggtggagtgtggtgcgcccaatcacatcatccaacgggcggcagtgtggcagaagtttgacgggcagagtgttagtcagacagtacagcaatggcaaaccgcgaattatgcggtaacgccgaaggctgtacgggcttataagatttctccgttagaccgtcaaaatatgcagttccatgccgaagatggcggcgtacaggcattatcaaccatacagaatggaaaaacccctttgcaaaagcaggttggggtggaaatcagtcaattgaaaataaaagatgaggagtaaatgatgagtgagccgaaagaaaatgagatttttattcaccctgaatatgatgaactgggcctcccttattacaacgtgccgaatgccagaattgaagaaaatctggtggcgacgtgtttgaagtacgcgactaaagtgatcccggtaattttcctgccgggggtgatggggagtaatttgaaatcgacagagggggagtcagtctggcggctaaacaggatattaagttttgatgttttaggttggatgtgctcgggtgcgtcttacaggaagaaaactttagacccgaataaaacaaaggttgatgattccggggatatcacgcctgatcacactgagaagaataaattccagacttgcaagcagcgcggttggggggagatagcccatatgagctatggcactttcctgccctggcttcaggcggtgttggatgatgagcgtctggcctttgagtactgtctggcagagaagggggaaaaaacccttcggcaacgtatggttgatatgagtttgaatgcggagtggggggaagagccgctgaccgaggcagaggttgaccatagttatgattttctctacccggttcatgtgatgggctataactggttgcaatctaatgaggagtctgccaagaggctggagcaatatgtggataaggttttagctttctatggtaaacggtgtgcaactaaaaaggtgattttagtcactcactcaatgggagggctggttgctcgttattattcagaattgctgaatggcagagataaaattttaggcattgtgcatggggtgatgcccgctacgggggcgccgaccacctataaaaggatgaaaaccggtgaagatggtgtgaccgggctggttgtgggttacgatggtgaagatatgactccggtgctggcgcagtctcccggcccattacagcttctgccgggaaaggagtatggtcgaggctggttacatatcgccgatggtaaaatgacgcataaactgccgaaatcagatccgtatgaggagatttatctggaaaaggatcgctggtgggggttatgtgaaacccggtttttaaacccggataaaaaggataagtggaaagatggagcaagctggaatagttatcggaaattgataagaaacacagtcaaaccatttattgaagagttaaccagtaagtaccatccgaatacttatgccttttatggtgccagcgagaaacatttatcctatggagttatctcctggcaagaagccagtaaggattattacaataaaacggaggattattccggcctgacatttgatcggccgatatacgatccttataacctggagacgggcgcaacccgtatggtgcagttttctgttggcccttcttttcaggatattgcggcgaaaacttttaagctggcaccgcccaaagagccgggagatgggacggtgccggtacagtctggccgtattgcagccagatatttacgcagcttgctggcaacagaagtcgaccatgaaggcgcatataaacaggataacgagacggaagagacgtttgcccggttattcactttgcgttcaattgtgaagatggtgcaagcggtgaaaggtgaaaattgaataggaaaacaaccttactgactttagcggttatttgtaccttatggtggtatatgcccgtattttattacccgattttaactgaaaaggaaaagaaagtgacaactgaaatgttagtgaatatgcagcctcattgtgtgggccgttatttgatagatcttcctgctggatttggcaatgttgccgaacaagggatatttattggtgatgcgcaaatagaaaccgagcgtttatatccacctgcatttgaacagcggatacggctaagagagcaggaattaaagaccatgcaatctgttgaaccgaaagatatgccttttttaaagaaagcctatcgcctccaggataatatggagggtgtgatcttcgacaggaatgaaagttttggtattcccggttttgcccgagtattagaagcgcatttgtatagtaatggtgtcgcttttaccgtaacaatgaaatttatggagttatcagatgataagtataaggaagatagagatttttatataaggcaagggttttctgaaaggcaatacaatgagttatatcaaactctggagaagatgaaaagactgctatccagaatcagcggccggaaagatacagaaatacctacagagacaggtacctgtattcctgatggttttattactggcagtcatgatgagaaagagaatatgacttttgtctataagcgagatgaaagtgatcattttactttcaatgttgaaatattgaatgatcttcaagagaaagaccatctgttagagcgtctgaggggaatggaaggtatgtttttgtccatgcatgctaagataataaggaaagggaaacgggaaattaatggcacttatacggaggaagttttaacaactgcgccgacagaaaaaattgaagaaccggaaaccaaaattccgggatataaatttattttaattgctaatgaaacaatcggggattataagaacccttttgttagaattaatctgagaaatgatcggtcatccgcaacgccgtacagtgaaaatgaactgataaagttttgggatgcggtaacgagtacttttcgtaaaagacccggtgcttttaaacggcaataacatgcttcaaataaaaccccttatagggatgtaagggttaaccatcagcagaaggagaaaccagatgtttaaagaaataaccagttagtgggggttgatatgattcattttgagctttggcaacttgtattaggcatatatcttttactactatattacacttggccgataattctgatactggatgtatttactctttatcggataaagaaatgcattaaagataaggaatacgggcgtgcgtcacgcttgatttttgctgctgtattcatgagtggttcccttatcgccttcataatatggataaatttatataattaaacagatgaggagatgattatgtttaatatgattggtttcagccatatcactgatcaaagtagaatcgtaagcgtgacagcgttaacgttctatgataaggacaaaccggttaaattaatcggtggcctgattttttatttaaatgcgaaacagggtatgcattcaatggtgatatatgattgttgttgcccgttttcgattccattacccaggataatatcgagttattattatgagttggcccatacctgaaataccggaacttaaagcagtgtcgcctctgcgttatcgattatggtttatcattttacttttgatattgattgtcggcacattggtttacgctgtgctaaaagataccaccgatttctatcacgcggcgatttatagcagcttaccgtcctttctggtgtggttgctattatttggtgcggtattaaatcgctatgagcaatattgcgcggcagcatacgcttgggaagaagccagtgctgaaactcgtttccaatggcagcaatggagcagaaaacaactggcggtgattggtaatattattctgacgcctgagcaacaaggtattgcgccactgttaggtgatgcggaagagatccctgcttttcctgaacaaggacgggcattatctctgccatcgagcgataggcggcaattattggctaaaatggatcaggattttgaacaacagtgtccgggttatcgttctcttttacgccagatttatattgcttccgacgatcacgcttcttatgaatctgcgatatatcaacagtggaaaataagcatcttaccgataataaaccgagatgagatcgataaattatacgatgaggatgatttcgaagggctgataatggttattgcgttccagtgctggccttctgaaaataataagaaagcgtacagtgaatttgtctcggctcaattattttcgtcgacaaaatttgccacgcaggaaaaactcactgtccttgccggtatgggaagaacattaccttcattacccggagaaataatcaaagacttacagatattgtttgaatataaccgtattgataaaaataacatgcggcacctttggataacgggtgtcacgaatgatgtcctgactgaactgacaattaacagccatgactctgcgtttaatcttttcaccgaaaattcggttcatttaattgatcatacttttggcccaccggggccgctatcgatatttttggcatcagccatattaactgaggcaattagcctgaccggtagcgatcatatcgttatcaatcaattaccagaggggagcgctagcctctatttaatgactaaggaattacatcaatgaaagttaatcgtcaccaccaatatggctattttgggtatatttttattacccttagccttgccgggatatttctcatgttgatctacttgaatcaaacattacttgaggaacgggggctgcttaaatccgtatggtatgcctacgctaccgtttttccgatcctattaataggcttatttggcaatgctgtctggtggcatattcggcagaataaagcgcagaaaaaactcagacctgaaaccgagcggacagcggatcgctccagccagtctgctttggtactgagtgacttgggcgatcgcatgcgcctccgttacgggcggttctggtggtataaagtccgcattttactggtggtgggcgaagtggagcaggtggaagccatcgcgccggggctgaccacgacgcactggcaggagggttatcgcacgctgttgctctggggcggcagtttgcaagcggaaccgaataccgctcaattgatggccctgcgtcgcttgcgccgttaccgcccgctcaatgccattgtctgggcgctgaccgaaaaccaaagtgcgcagccggtatggatggacaaggccctgaggatgttgcaaaaacaggcccaacagttacgctggcaggctccggtctacctgtggcaggtgtgtcacagtacctggtctcaggaaggtcgtatcactcagaccgtcggctgtttttttcctgaacgctgtaccccggatatcgtggcgacacagttacaaacgttggttgacccgttgcgcgagcgcgggatgcagcaactgttggagaagacggcccacgattttctctgtcgtctgtccgcgaacttgaaacaacaggggattgcgcactggcaacaggtcctgacgccgtggttagcggagtatggtgatgtggtgtcgctgcggggtttgatgttcagtttgccgcttaaagcgcagacgactcgcctcccgcagatctggctgcccgacacggcatggcagggggtgttggagggcagtcgttgtttccacggtcggcgggtgggcatgctccacacacagaccgtttgtcgtggcctgatagtgctgggcttgttatggggggccggaatgatgctctcctttttcaccaaccgtgaccagctagccgtggtgcaggcggcggtaactgacctgaaagtccagccggagaattctgatgcccagttgatggccttgaaggatctgcgtaacgaggtggaccggctgcaagaccgggctgaacacggcgtgccgtggtatgagcgctttggtttgagtcagaatcagaaactgttgacggcggtgctgcccgattatgcgcaggttaataaccgcctgatacgggacaaagccgctgcggtgttgcatgcgaaactgagtgcgctggtgaatttaccgccgggcagccctttgcgggctaagcgggcgcaagccggtcatgaccagttgaaagcctacctgatgatggcgcggccggaaaaagtggatgctgtgtttttaacccggatactggatgaaaatgaacccgagcgggccggtattgcccccggtgtctggctggatacggcgtgggatttgtggagtttttatgcggagaatctggccgcgcatcccgaatggcggataaccgcggataaggcgttgattaaacaggtgcgtcagttgttgctgctccagccaggtaagcacaatgccgaagcggcgctttaccagcagatgctgcaatcagtggagaaaaattattcggacctgacgttaaggcagatgaccggcgacaccgatgcggcgcggctgtttaccacctctcacgtgataccggggatgtttacccgtcaggcgtgggaaggcgggatacaaaaggcgatagcgaaggcggtggcgtcacgtaaagaggcaattgactgggtgctgagtgataaccgtcaggcagtctcggcgtcggtatcgcccgaagagctgaaagcccgtttgaccgcccgttactttaccgatttcgccagggtgtggcaggattttctcaacagcctgcgctggaacaaaacccgtaacctgtcggatgtcatcgaccagctaacgttgatggcggatggacggcagtctccgctgattgcgctgatgaacacgctggcctatcagggcgaaaccgggcaacaggggccgagtttatcggactcattggtgaaatccgctaaaacgttattgaataaaaaaacgccgcgaatgattaatcaacagacggctggcttgcacgggccgatggatgaaacctttgggccgttgctggcgctgatgggagaaaatcaggcagaaggaagaatcaaggcggacagtaccctgaatttacaaaccttcttgacccgggtaaccgacgtgcgtctgaaactgcaacagatgaacaacagcgacgacccaccggcaatggcgaatgcgctggctaagacggtatttgaagggaaaagtactgatttgaccgatactcagggttatgggcgcttgatagccgccagtctgggcggccaatggcggagttttggtcagacgctgtttgtcgagccattagcgcaggcgtggcagggagtattgaaaccggcgacggcgaatctgaatagccagtggcagacggcgatagtggacaactgggatcgggcatttgcgggtcgttatccgtttgccggtggcgacagtgaaatttcattgccgatgttggggcaatttatccggtcagattcggggcggatagagcagttcttgacgcgtcagttaggcgggatactgcataaagcgggtaaccagtgggtagtggatgaggtgaatggtcagggcgtgcagattaacccggattttctaaaggcgataaatcagctcagtcagttatcggacctgttgtttgcggatggcagtcagggattgcggtttgaactgcgggccagagcggtgcgggatgtggtggaaactgacctgacgatagatgggcagaaactgcgttattttaaccagatggaaagctggcagagctttcgctggccgggagagacctataaaccgggtgtgatgctgacgtggaccagtgtcaatgccggggcgagattgtttggtgattatcaggggaactgggggctgatccgctggctggcacaggcgaaagcggagaggctggatgaaagccgttaccgactgatatttaccgcgccggatggattaccgttaacctggattttgcgcacagaattgggcgaagggccgctggcgttattaaaactgcgcggatttaaattgccgaaaaatatctttgtagtgatgccgggtaatcacacgacaatatcagcggtaaatgacgatgatttgatagaggaatagtgcatgcgattggcgataaatgaggaaatagcgtaaccgttaactgctttcattaacaaaatagcggtcagaatgaatatcactacagatattccgatgaagatgtttggctatatgggtgagaagcctgatttcacttttctcagtgaagagggaatattgctatggggttttcttgatgttattggctatcttattattcgtgtggcatgaatgagaattattcttctttatcgtgatggagtgaataagatttaaaaaggagtgatgagactgaaacagcgataatctattagataaaataaaaataggcattattatcatagggatgtgattaaaatagcgtattcaggccgccttcattttatggcaatcaatgccagtttacttttgtcaataaatgtcatgttattgtcatgaagtttaaattattctgttcgacatgctgttatatcggcggtgataaaggaaagtgcattaaaaattgtatttttttgaaaaaaagagttgatttttataggcacccgttaagaagatagtaaaattcagaaatcgctcattctgttcacccattgatgtattgcgaaaaggtgagtggcctgtgtaaatatcttctatccggttaactaccggttgggaaatacctgtgaggttatttcccggtatgacgataatgacatgccgaacttttattagttttgtgttgtctgccaacgaccgtaaaaattattaataacgtcgccagtatttgagacaccatagagtaaataggagtaggtatttaaagatgaaaaaacaacaactgaggctggcagttttatgcctgctactggccgcctgtagccagttttcggcacaggcgggaatcattgaagcgattaatcataccaaatgggcgattaaccggttcagtgtggatggtgaaccgggtatcgatattatcggcccatatcagggcggtggtggtggttgctgctaccgggccccggagaagtggcgaccggggatgacggttaaggtggattgggagactggtgtcgctttttccgacgattttcccggctatgaaaatagagaaaaatatctggaatgggatagaaaaattagagcccagaaacgtcagcatagccaggtcgtaccagtgcccgattataccgggcagcgtacctgcggtattacagtacatttcttaccctgtgatcaggtcaaagtcaccacttcgtgtaacacctacggtagtcctaactacccaattaaagaacccttggaaatgaagggaccaaaagtatgtccgaagtaatgcatgcaagcacctcaagtccagattgtcactaatgtgaaggagtagaagatgaaaaaacaacaactgaggctggcggttttatgcctgctactggtcgcctgtagccaatttccggcacaggcaggcatcattatcgccattaaccataccaaatgggcgattaaccggttcactgtggatgatcaaccgggtatcgacagtatcggcccatatcagggcggtggtggcggttgttgctatcgggctccagataagtggcgaccggggatgacggttaaggtggattgggagaccggtgtcgctttttccgacgactttcccggttatgaaaatgatgagaagtatttggcgtggagggacaagattaacgcccagaaacgccagcatagccaggtagtaccgctgcccgattataccgggcagcgcacctgcggcattacagtgcacttcttaccctgtgatcaggtcaaaattaccacttcctgtaacacctacggtagcccgaactacccaattaaagaacccttggaaatgaaggaaccaaaagtatgtccgaaataaaacatcatgatcttgtctggttgccagccccttttccgtctcaggggcggttacctgccaagagttatctggtcagggaaaactgtcagcaacagagcagtcaggaaaaagcttactatcaggaactttgtctggccgccaatcgccgggtaatccgtccctgttgtaacacgttgcatgtcagcctgttttttgatggcaccggcaataatttatataacgacctttatcaggctgttcctaaccatccgaccaatgttgtccgtcttttccaggcaaccattggggcgggttatgccggaggggcatcaggtaagccgttactggataatattgagagcatcggaagaaagtactttaagtattatattcccggggtgggaacccctttcccggaaattaatgagctggattacagcaaattggggctggcggttgctagcgggggagaagaccggatcaattgggcattactgcggttgattgatgtattaaagcgcgtattggtaaacgacaaaattgatgatgttgcttgtcaaaaatccctgaaagcgatggcaaccacatggaatatgctggagttgggcggtagcaataaccgctatgaggagttttataagcagtttgcgagcttaaaacgtgaactgaggatagcccgcagtcagcccgggcggggtaagtgtaagttgttgggcatgaaattgtatgtgtatggtttttcccgtggggctgcggaggcgcggacttttgttaactggctgactgaactgtttccgccgtcgagagaagcaggccaaaaaccggctcagtgtctgcaacataaacacgatacagacccggatagcaatttacccatcagcgtagaatttctcggattgtttgacacggtggcgtcggtcggggtgccccatatgattcctgttgttgaaggtcatatggcctgggcagacggcacgcaggaactgccatcggaggaaacttacggtggtctggtgaaacgttgtgtgcacttggtctcgacccatgaacagcggttgtgtttcccgatggattccattcgccgggcggacggtacttacctgacaggcagcaccgaggtgatttatcccggtgtgcactctgatttggggggcggttatccaccgggagagcagggtaaggcaataggtgaaaccgatggtttgctgttatcacagattgctttgcatgaaatgtatgcggcagcctttcagactggggcaccccttaaggtcccgaaggaggtattacctgacgatttacaagatcaattgtggcgggcaatgagtgctgatatccagcgggaatttgatattgacacacaattagtcaaccgcttcaacgcctggcgtcaagtgactctggggttggagatgccccaacaacccctgtcagatgaagaagcggcccgctttgaaccggtgcgggcctctgtggcattggaacaggcgatgaaaaaccagatgaactggctgacggcctggcgtatcaatcgttacgccaacggcacgctgctcggtgcgccgttttttcatgaggctcctaatcgtgatgcgaaaaaggcgcattatgaacagagtgaacaggcacaaaaagcggcacaacagcaggtcgaggctaaacggaaagtgcagtggaatgaattttttcgcgatggaggaaaaacgccgccgttgttaatgcagggagtgccggattttgacccggaaaccgcccagaaccagttgcgagaagcggcagcggaatttggtcgtgactaccggggagaaagtcgtgagcaaagcaatctaaaacaatttgctattgaaactctcgcataccacatgctctatatatgggacagtaatgatgacgttaaggaatatcagcaaatgaaaacggcgggagaagcgttggtcaaaccgcttttccggcctgccccagtgggaaaaaccggccagcaggagtcacccgagtcattgttggtcgctctgtatgacaatcaggttcatgattcccgcgcctggtttatgtactctattctggacacccgcgagccggaaggcggttacttccgttaccggataatttatttcggtacggaatgtaacaagcctttatcacccctgacgatagccggcaatgtcgtcggatcgacgaccccggttggtgcagcgttgcttttcttgaaagataaaaaagtcggcaacatgttgtcggatgccgccgacaaggtacccgtcacaacgtgggaagtgaccgcgcggtatttaacttccggcgagctgatcacgctgttagctggaccggagtatagaaaagcgttcacccataatgtgggcgaagtgacccgtcagcagagggaatttcttaaagagcggcggttgcaaatgaccaaagatgatctcaaagcgcgttgggcgggaaaaacgctggagccgactccgttcaaggagcctgagaaatgaaaaacgtaatattactttgttttaacctaaaaaggaaaattaaatgaaaactgaaatattagccaatatgcagactcgttgtatcgggcattatctgattgatattcccttggcatttgaaaacatcatcaataatgagatatttattggtgaggcaaaaatagaaaccaagcgtacgcatttatccgcatttgaacagcggatcgagataagagagcaaaaattgaggacgactaagactaccgatccgaaagatctgccctttttaaagaagatttatcacctccagggaaacttatatggcgtgatttttgacagaaataatagtgtcagtgaacccggtttttcccgagtattagaagcccatttatatgataatggggtggcttttattatagaaatgaagtttacagaaatatcagatgataaatacagttattcaaaggaccgttatataaaatccggattgaatgaaagccaatataaaatgctttctcaaactctggacaaaatgcaaaggctaattaccagagtcagcggcagaaaggatagcgatattccgacagtggcaggaatctgtatccctgacggttttattgccgactataatgatgaaaaagaaagtataaagtttgtctatcaaggaaatcaggatgacaattttacgctcagtgttgaaatcattaatgaccttaaaggggaaggcactttacttgaacgtattagtgaggttgaaagggattggtttattaattatggcaagataataagaaagggggaaagagaaataaatgggatttatggggaggagttattagcagtaggtctgcaatcttttgacaatagcccgcgttatcaatttgattttattgcaaatgatatgatgttggatgataaaaaaatctgtgttgttattatgttaatgaattatcagttacctgcaacgccatatagcgaagatgaattgatcatgttttgggatgcaataacgaaaacttttcgtagaggaccggatgctttcgaatagtaataaagtgagagagtgagtgttttaaataattcactaatgagaggtccaatgtgttatggtttatttttccagtgttttttttgattcatatgttgtttttaagtccggtaatattgtttgttgatatacttatcatttgtcggatagttaaacgtggtgggtggaaaaaatataaaattgtgttttttttaattcctggtgtgttattgatgagtgtcttggttattggtgtgacctccgccgttatcatgttgttcggttttttatgtgaccattttggttaatggcaataatttcaacatcaatagcaaggtatttcgatatgaagtattgcctttgaatattaattgcttattgtgtgattgctctggcaataaaatagagaatatcgttatgtctggcattattttttttaggtgatatcagattacagctatttttctctactattttacttcccttctgattatttattctgaacgggaaacgatattttttaataacttttttggaggaccatcctatggatgatttaaccctgcgctattatgaggcagaaatgcgctatctgcgtgaagcaggcagagagtttgctaaggcccatcctgaccgagcagccgcgcttaatctggataaaatcgttatgcgtgatccttttgtggagcgtctgtttgaaggctttgcttttatgatcgggagtctgcgtgagaagctggatgatgacttgccggagttgacggaagggctggttagtttgttgtggccgcattacctacgcacgattccgtccctttccattgttgaatttgggatggattgggcacagttgaaaaattcggtacaggtgaaaaagggttttgagatcctttcgcaaccgatcggcccaagcaagactcggtgtcgttataccacaactcaggcggtccagttactgcctctggcactgaccgacgcttccctgcaagaggaaccgaatgggcgttccgtgattcgattgcgttttgactgtggaacactggtggactggcaccaaattgatttgagctgtttaccgctgtatctcagtgctgacagtccgctggcctatgcgttacatcgagcgtttacgctgcaaacccaacagctttacctgcgtttacccggtcagcccgatcgtcagccatttgacggccgattctcaccaatggggtttggcgaagaggaaaggttatggccgaaaggggaaagttcgttcagtggttatcaactactgctggagtatttcactttccgtgaaaagtttatgtttgttacgctctgtgggctggaaaagttgactctccccgagagaacgccgtggtttgagctggatgtggttctgcgtgaaagttggccctttgatttgccattttctgccgagcatatccgtttgcactgtaccccggtgattaatctgtttcggttggaatccgatccgcttcaactggcaccgttgcaaactgagtatttgctgtatccggtccgctatcaggatgggcataccgaggtttattccgtggatgaggtgtcttcttcgaaacgcgagggccatcagtatgtgccgttcagtagtttccgtcataaaggcggcatgttgcgccatgatgcaccggagtgctacttccatacccgtgtgaaacgcgggccatcaggtctgtgtgacacctggattattctgggtggagcggattttgatgataatgaactggacgaagaagatatcttatctctcacgttgactggcactaatggtcaactgccgcgtagggcgttgcaggatacgctgttgaataccgccgttaatcctccgttggcggaatttacggtacgtaacctgtgtgaaccgacattgccctgttatccacccaatcgggaccgtttccactggcgagtgctcagccatctgggttctaactttcttagcatgatggataacccggaagtgctacgcgggacattagccctgtatgactggtccgacaatgagatgaactatcgccgtctggaggcgattgtcgcggtgaagcattcgctgattgagcgatttgagcagggaagtttgcggcggggcgtgcacattgaagtgacattggatagcaacggctttgcaggtgccggtgatatctgcttgtttggcgaaatgctcagccgcttctttgccttgtacaccgatattcatctgtttaaccgacttacgctgattttacaacctacgggggaacgactgttatgggaagaacaacactgtcagaacattcccggttgatggcaatactggaatcggagatttcgacactcgatttctaccaattctgtcagatgattgaacgtgcagttcctgatcggccgcctctggggagtacggaaaatccggttgatgatgcgatacgtttgcggcctcatcctggtctgggatttcccgccagtgaattgaaagcgatagaaactgacagtgaacatccagagcgtccaccgacagccagaacaaactttatgggactgtatggagtagattcttcgttgccaaccgcttacctgaacgatatcgttcagcaaagggaagggaatgaaactatcgaagcctttctggatatttttaaccaccggatgttcacccagttttatcgtatctggcgtaaatactcctatccggcaacttttgctaccggaggaaccgatagaacctcccaatgtctgctcggattgattggcttagggataccgggtagtcagcaacagattgccacgccgatgtcccgttttctggcgctgctcagtgttatgcgtctgccaactcgaaccgctgaaggcgtatcggcgctggtggcattgttggcaccgcaaacccggatcgtggtgacacctgcttgcccgcgacagatccatctgatgcaaccggcgaatctttcagacactcaccgaatttccctctcgcagcgtaccgtgctaggcagaatgggcactgatatcaatagccagttattgctggcgctgcataccgattgcccggatgaagcgtggggctggttgccgggcgggcagttgcacactgattttttggtgttgttacgggtttatttaggctggcgataccaagccagattgcaactgactctgccgacccgaatattaccgccaccgctgctaggtggtcagcctgttcggttagggctaacaggagtattagggttaaaggctgaaaatcatcagctagcagtgcctgacaacattacggtgaatttggggtgttatcaggggatatcaccagacagcaatcaagacaaagggggagattatgttaactatccctttttataaaatggtgccggtaatggcgacgatagcattactactgacaggctgtggtctgactcagaccgtgactgatggcacggcagcggccacccggtccttttttcataagcgggtgaaaacgttgcatctggattttattccacgggcagcggttaataccgacacgggagaaagtgttgctctgtccgttccggcattagttcgggtttatcagttgcgggataacaacgctataaaaaaggtggattatgcggatttgttggatgacggcgaccggatactgggcgctgattgtctggcgagtgaagaggtagtggtgaaaccgggtagtcacgcatcgcttgatatgccgatggcggcgcaggcgaaatatgtggcggtggtgggattattcagaaaccccgatgtagccaaagggacttggcgtcggatcataaaacgcaacgagttgttaccagatagtcctcgtattattgcgcttaatgccggtggcttgactttattacctgaaaaggggtgagtaaatgaaaaaaccttctctgtatgaaagccttttcggcaattttaattgcggtctggagttgcatcaggtgagtgaagaagagcaagttattttgtcggtattagacaatatgcagcgtatcctcaatagtcgtgccggttcgcttacccatctgcccgattatggcctgcctgatctcaacactattctgcgagggttgcctacgtcgtcacagcgcttgatctcgacgattgaacataccttgttgacttatgaaccgcgtttgaaacgagttgatatcacgttattgccggagctggcaccggggcatctgcgttatgacatcaatgctgaactcaaaggtgtggggctggtgcgtttcagcactgagtttgtaccggaagggaatgtgttgatccgccatttacgccagcaagggtatgtggattagcattattgctgttgagctatacccgtcatctttcaagttgcctctttgttggccgcactcgctcaccccggtcacatagtttgctatgctcccggggattctctcccttgcttggaaatttctggtgttatttttcaatatcggagtaaataaatttttaaataaaaaatagagcgaaattattttaattcgtttttccataatgaaattaatgatgttgtttcagcggtagccttattaatagatcaaggctaccgttatttcttctggtcaatccagattgaatattattgtcaggagcagaagagtttaataataaaattgctatgacaataagaatttttctggtacataatgatgaaaattattcgctaaacagtattcttccagttgttggctagaatgaattcctatctttttatatatctgagccatataggtttcaatggtgcgataagcaatatttaatatctgtttaatttgttgcctggtgtatttttgtaaaaagaaaaaaatgatatcccattcacgtggcgtaaaaatatcgcttggtggttgaagtataatggatgtcggtagttctttataatattgatgtaggctggctaatgagtagcttttggcttcccaacaatgatacatgacgccgatacaatttccatcttcatgataaaaaggcaatttttcacaaaagtaagatgacaggatttgatcttgtccgaatatatgtgtttcaactgaacatattctctgttcttttgccatgaccattctgtcttgaataataaattccttagcaaattcagcgccgttccaagggagttcatgatcataaagcccatcataattaaatgaggctttaaaattatgaatatatttctttgttgctgagttaccataaatgaaatttgaagaactatcttttattccccacggctcattgctgatttccatcgtgttgataatttgaggtgatattatatagttcttcataaagactccttgaaaattttcagcttgaatgaacattctactttgagattccctagcgctttctgagatatagcgataaaattgatgtttttcataagaattttctagtgttatatgatttcatgattataaagctttctgcaatcgaatgatttttcaagattatgaataaattattttgttgctggattgccgtaaataaaacatgaagaactatcttttactcctctacaattcattatccattgtattgacaatctgaggtgatattgcatagttcttcttcatgaaaatttcgttgtgatttagcgcctaagaaaacattttgcttttccgtttcacaaatctctctggcacgtagaggtcatagtcattcgtgcgacaatagtcttctaattgacgactggaatgaacaccaattcgtttatatattcgtgagaaatggctttcaaccgtacgataggagatatttaacatcctaccgatttgtttactggtatacttatgtaacatgaggaaaataacatcccattcccgtttcgtaaatatatcggttggtggagagaacagaatagatgatggtagtttcccataaaatagacgggtaaatgagaaatcctgagctttccatccgtggaacatggtaccgacacattcgttatcatcattatagaatggatatttttcttggaaataagatgaaagaaaattatctttcccgaacatatgtgtttcaagcgaacatactcttgagtctttctccattacagttttatcgtgaataacaaattcttttgcaaaccccgctccatcccagggaatttcatcatcatattgcccttcataatcaaatgaatctggaagattctggatatgcttaagcgctaaattaccataaataaaacatgaatttttatctttgatcccccaaggttcattactttgctgcatggtgttaataactgaaggtgaaatatctaccttattaattttgttcataatgagatcctattgtaaagttaagttagtaattatggtttataactctctactgccaatagtgataaaacgttcaggaatataaagatgatagttatttttctgacagaaatccgctaattctatctgtagtggtaaattaaatttctggtaaattgactgaatatgattaacaacatcttctgtgctcatcgttaattcttcaccgatgctctcttcatcctgtgaacgcagggttagaaaaagcacttcccactcagtttgcgtcaatatattatttggtggcgtaaattgcaggtttgatggcaatgttttgtcataatagtaagaaacagaaaaatcttgaggttgatacatatgaaagaagatcccaatgcaatcattattctcatcataaaggggaaatttatcacaaatatagctttgttggacgttattttctccaaaccgatgtgtttccagtgaagtgatgcgttgcatagtttggatggctttttgatcctgacggtggaattcttctgcatattcggcgataggcgagggcaattcacccgtggtaagcccgataatatcgaaatcttcaggaaggttgagtagttgatagaaagcagggttagcataaataaatcttgactgatgatctctggcaccccaaggttcattgcttttgtcccacatcagggttaattgtggtgtaataagggtggatttgtttcgtatgtttgacatagtaactcctaaattcctatttaaatcattatctgaatggttgctctttcgattatatcttaagttgacagccatataatagaatataatgcttttctcgtcaaaaagcgtatgtttattaattgaatttttactatttaataatgaaactttaaattgataggaatataactatatatactattttagatgaagattatttaaatgatttattgaaagagtaggtaaaagttgttgttatgctcgctgcggtgcctgatatcagctatttttagctaaaaaataggtactgttaatggtaaatgagtgcaaattatacttgaaattatcagcatcctcattgttgtcagttgctcaatagttatttgtcctaatgcttaagagctgttctgttaaactatttgatttactcgtctttgtaataaagaacaaatctgagcagcggcatgaaaaaaatgagggtttttggtcatatttttgatgtgacataaagattaaactcaataaattacgcctgttgtgttaagtatatgctcttggttttttacattgtttgtgctcattacccctttaaaaggggtgttgccaagagtgactctcttgggattaagtcgtaaatacttaatcaacgacgctaacataaatttggtttttttattggaatttaattttttcttaatgctataccctatggatttcaagatgcatcgcggcggcaagggagcgaatccccgggagcatagataacgatgtgaccggggtgagtgagtgcagccaacaaagaggcaacttgaaggataacgggtatattaggtcatggaggatatcaacagtagaaacgcaaccgttgttattgaacttagggttcaatatcgccaccatcgatcgaaggtgcagttatcaatttgataactgtattgtcctttttagatgattagcggggaataggaggaggttatatgccagcaagattggtaaatcctgaaaaggttaatgaggttttcgctcatctgaatgaaagctcagataatcataccctctatactgcgttgatgaatggggttgatattactgatcagataaaagggttgttgctttcaccaggttatcgcatggttcgtgttgatggtcgatttggtaatcgtatcagtcaatcccacttcgagttggcattggttaacgatgtgtctaaagaagttgcctattataatcgagtggttatacagccagatgtggtatcaaattgtcgcccagtaacccaaattcttgtttggcgtatcaggacgcctcaacaccgcgctgttctacgtgatctggctggtaaggtgttctttgattacttgcttgaacattacaacgtgattgtgtcggatatgaatcaaacgacggatggtatcgctttttggcaggatagaatgtacgacgcactagcatataatatgcatgtttatgcttatgatatgattacctgtgagttgcgtaagattttgacccagaatgatgttagtcgccaagaatcttggttatggggagatcctgaacaccatcagaatagattggcaattatttcgaaaagtgaattacccatctatggggtataaaagttcataacattatagttggtaatgttgtacttattggtcgtatttattcagataagagtgatggggttaaagggttatttttcactatagatattttattgcaaataaataagttaaattttcctgcatttctgatgcaacaacattaataacttaacgttattaatttcagttatgaaaaattttcaataattaaaataaaaacaattatttaaattgaattttaatcttgttttttgactattttatttgcattgttaacattaatgtagggatatagggcaatatatagggggtaaacagacttttttatgtattaatgttgattttgagtttttgctctatattattttattctgcttataccctatggatttcaagatgcatcgcgacggcaagggagtgaatccccaaactatgtgaccggggtgagcgagcgcagccaacaaagaggcaacttgaaggataacgggtatattcatttaatcgtatttgcagatatatataccctatggatttcaagatgcatcgcggcggcaagggagcgaatccccgggagcatagataactatgtgaccggggtgagagagtgcagccaacaaagaagcaacttgaaagatgacgggtataaactcattatgtctctgagcttagggtttttgcttcactatatatttcacaatttttgtgagtaaatttcttgttgaggaagaaatatgtttaaaaaattataacgaatcacttctgatatcagttataacaaaggcgttttttatcattatttcgttggttggaaagaaaacaattagtggaataatagcttaatagagttagaataatctgactaattagactggattatataaataatgcctgattgatagctgtcattatatttttttaccgtgggaataacggtggagttgctttgcccacggaaaactagattctcaaaaccgctgctgtatctttcagatgcagtggttttctataccctatggatttcaagatggatcgcggcggcaagggagcgaatccccgggagcatagataacgatgtgaccggggtgagagagtgcagccaacaaagaggcaacttgaaagataacgggtatatttaacctcagcttaaattaagggattgtttatggggaaatcatcaaaccgcagtgcagaatatttctttactggaagatactacgatgatgatgatggcaataatattgttgccattggtgtcggagggattatttatgccaaaggaggagatgatcgtataaccctcgggtcaattggagcaacggtctatgctgattcgggtaataaggttgtcaatggtggtgccggatatttaaaaatagtggataaggaaggtaatctggccgtacatggtgccgcaggttattcaggaattgataaatgtggtaatggtaatatttcatttaccggtacggcggggggcgtttctatggatcaccggggtgaccacggtgatctcaatttttcaggagcagcggcttataatggcctgaatcgccaaggacaatccggtaatgtgacttttaacggtgttggtggttataacgaattatggcatgaaacgaatcaaggtaatttaaattttgccggcgctggggccggtaataaaattgaccgtacctggtatgatcactatgagaaaagccacggtgatgtgaaatttgacggtgggggagcagcgaatagtatcagttcgcgggttgaaagtggcaatattaatttcacaggtgtcggggctgataaccaccttatacgtaaaggtaaagaaggcaatattattttgcatggtgcaggggcatcgaaccgtattgaacgcttgcgtcaaaatcaagatcaatatgaacagacccacggtaatatcgaatttgaaggcactggtggttataaccgaatttattctgatattgctcatggtgatattaccttcgaaggggccggtgcttacaatgaaatatcaagaatcggcgaagatagtgattctcgtaatgaagcactggaatatgctaaagctgaagagattgtattaacaacagcaatgatgggagggagttggattcagcaatcccaacaagtaaccggtattaaatcaacggccgagcctgacacttatctctttgcatttgccgacgaaatgtacactaagattagtaaagtccaactccgaaatgatcctgaaaccggtaagctcagttattacgccacttcttggtacaaagagggcaatcaccttaataatcttgctacggagaatatctcttcaagtaatggatttttcgatatacgttccaatgggggttaccgtctctttaatctaatctttgaacatcatcaccccgttattattcagcatactgttgaagaagatttgcaggaaaaccagtgggtgacttatgccggtggaaccaatgccagagcagaaaatgtcatgctgactaatgccaaaatgcatgggaatgcaatccattctggtggtttgatattagatgtttcagcggtgaaatctaaccgtcaagcgaacacgtatatctatgccaagtatgttgagtcatataccaaagtagtgatggttgagttgagaaatgatgctaaaaccggtgcgctgcaatattacgccagtgcgtggtacaaagcgggtgatcatacaagcaatctggctgctgaaaaggtttccccccaaaatggttatcgctcaatggatataggaggatattcgttaaccaatctgcaataccaagtgaatacagtgcgccgtgtttctgaacatttagcacagacagaagaatatagtcatcaggagttggtgaaatcatccgcggatatgggtgacagctccggtgacattaatttcaagggcatgggcggtggcaatgtcattacctccagtgtaactcgtggcaatatcaattttgaaggcgcgggtgctgctaatgtcatcgtgaaaaagggggaacagggcgatttgacgttccgtggtgcaggtctggcaaacgtactggttcatcaaggccaacgtggagaaatggatgtttacgccggcggtgcagcgaatgtattggttcggatcggtgatgggcgatatctggctcgtcttttggcgataggtaatatctcgatccatcaaggcaatggcgatagccgagttagcatgtttgggggttacaacactcatagccaaataggtaatggcaacgccaattggttaggtgcaggcggttttaatgtgatgacccaaacaggtaaggggaaggtctcctcggtactggcggggggtgccaatgtgctgactaagcttggtgccggtgatttggatgccggtatgcttggtggtgcgaatattatcacgcatctcaacgatggtgaaatatcaggtaccacggcggttgcgttagggggggccaatattctgacgaaaaagggcagaggtaaagctattgcgctgatgggtggtggtgccaacgtgttgactcacattggcaatgggagtacgacggggatgatgttaggtggcgctaatatcttgactaaagtcggaaacggtgacgccacgggtatcatgctcggcctgggcaatgtgttgactcatgtcggtagcggccagacgctgggagttatgggagccgcaggcaatgtttttaccaaagtgggtagtggaactacgattgcggccatgattggtgcaggcaatatctttacccatgttggtaacggtgatgcatggggattgatgggaggtttggggaatgtttttaccaaagtggggaatggtaaagcactggcattgatgatagccgctggtaatgtgtttactcacattggtgatgaaatgagtgttgccttgatgttggctaaaggcaatatcgccaccaaagtgggcaacggcatgatgctggcagccatgatcggtgaggccaatgtgatgacccatattggtaatggctcaacctttgctgcgatgatcgggcagggcaatatcctgacgaaagtgggcaatgatttggcgctcggtttgatggtgggtgaggccaatatctattcgcatgtaggtaatggcaccagtattggcttgtttgctggtgagctgaatgtaatgactagggtaggtgatggcacaacattggcggcaatgtttggtcaagccaatatcatgacgcattccggcaatggtttaaccggcgttttagccttaggagaggcgaatattgtcaccaaagtgggggatgattttatgggagtggttgcggcggcggaggctaacgtcatcacccataagggatcatcaaccactgctgccgtgctattcggtaagggtaatatcctaacgaaagtgggcgacgggaccacagtcggcttacttatttccgatgtgggtaacatcatgacccatgttggtgatggcacaacagtgggctttgctaaaggtaaagccaatatcattaccaaagtggggaacggtaccggcgttaatgcggtttggggggacgcgaatattctgacgcaggttggtgatggtgaccgttataacttcgccaaaggtaaagcaaacattattaccaaagtgggtaataatcaggaaatcacggttgttcagggtgatgccaatatcatcacccatgtggggcaaggtgatgattataccggtgcttggggcaaagctaatgtgattaccaaggtcggtgatgggcgcaatgtcgtgcttgccaaagctgatgctaatattgtgactcaggtcggtaacggtgacagctttaatgccttgtggagcagaggaaatattgtcactaaagtgggtgacggtatgcaggttactgcggcaaaaggtgaagccaatatcacgaccaaggtggggaatggtttaagtgtcaccgcgacgcatggcgattttaatatcaataccaacgtgggtgatggtatttctattaacgcagcgtggggtgaatataacgttaatactaaagttgggcagggtctcaatgttgcgatcatgaaaggtaaaggcaatgccaatattcatattggtgatggtctggggattaatgcctcttatgcccgtaataatctagcgattaaggtgggtaacggcgatttctacacgctttctattgctgaaagcaatacgcaaagtaataaccttccttttctgtttaaaagtattaaacgaactgtgttaagtgtggaaggtagtcaggcaattaactacctgattcacggtaatgaggcgaatagttctggtacatatagaagccgaggggcgattaatttaactgaagtttctgccattgatggtttccagatgaatgccatcgatgatgttggttcggatctgcgtgataaattaagcggcacagtaactcaggtggagattcctgatactgaggctatccagaacgccttgcatattggagacaaagttgattcgacgcagagtgaatcatcatcacaagctgacgctgttattaaacaggcaaaacaggacagcgctgagcaaaatgcgttaaatgataaagagaaggcggaggaaaattatcgcattctggaacaagaaagggataaccaacttaaagaaatttcaaaaccacaattccaattggaatcaacagatcagaatgtgctgaataccaatgggcaagtacagcgtgatgcaataagtggagagtctagggcagtaacgaaagagttgctttccatgactcaacgtctgaatgcgcttaatgacgatgggaattacgctggggaattgggtgatgagtggcgtaatcggtttgctgtgggatatttggaccgtattcaggagaaattagatgacaccaaattgatctcacagaaaaaattagctgatttatcgccgcgctttattgataaccaacaacaagtcaaaaatgcagttggtaaatcagaaacaggtttagagcaaagttatcacaatataaagaacgcagacgacaatattgaggatgcgcatacaaaagcgaaatcaagacagaaagaagcagatttacaacgtctgcgggcaacaaaagcggaaagtgacgcctatgccgtgtatgaagaagcgaaacaacgcggtgaacatgatagctcggtagcgaaaaataaagccgctcaggtacaggctgatgcgaaaggtgcgaaacagactggtgatgtaaaacccgagcgtagcggggcgaccggcagtggcttgtctgggaaggcttatacaccaatcgacgtagcgaaaccgaaaagtcatatcaatcctgaagccaaaatggaagctaatggctggaacagtgaagatctcacattaacagccgcagatttggcgggattgaatagtgcgcaacgggcgattaatcggctacagatcaacaggagtagtcgccctgagaatgtcggtgcttcgatcatttcgctgcttaccggaacgccatctgatagggttgtggaacctatctcgaatcaaaccagaaagttaatcacaacagcccctgtaatgtcgggtatcaatttgcaagggttagggcaagttatcggtggagatagctttaaatcccattcttccatcttgagagagtttgagccttttttgctgagtcagggtgacaaacggtttattgcttcaacgaaaagatatcttggtcagataaataccgatcggcccagtaaggcgctggtggcagtacgtgaggcgttcaacaatgcggccgaacaacctgatgaacagcatgtgttgcaacttgagcaagcgcttgctcattggcaacagcatgatcccaatgaatttgccaagcgtggtcgattagtcaaaagcctgcgttttgagatgggggaactggttgcctaccttcaggcaaaaagagctgaatcagccgggattttaggggttagcttagcgcctgaccatgttgcacagtttgaccaacaggtatcctttgacgggttcgggcgtgtggtgggtctgaaaggcgatatcgcacaaagcgacattcatcgtcttactgatttacaaatcaagccattgacccagattaactctgcggcggagcgggaagcgcctaaaactgaaagtgaaagtctcattgttttcgttagccgattgcaacaagaagcgattcccgaagggatgccgctaattgaacgagccaaaaacctttggcttagcggacaagtcacacgacaggaaaccattaagctatttgaggatgcggttagccaattgcagacacatcctgaattacacacgttagctcagcagttattggctgatgctcgtaaagaaaagaccacgggacaatatattgacaacctgtttggccgccattttgattctgaattggccgatgagttggtgaaaacagcgccacaggatgctatgaccacagcccggcagacaggacaatttctggtagagagatttgaacagtggatagggggtttttatcccgatgtcgccgagcgtgaaaagattattgctaaaaagatggccggctttgccagggccattaacaaggactttcgtccctggtttagtcgggtacctgaattgacgacgttcctggacgaaccgacttttgccaatttcaaaatcatgatgactcaggttgatgatggttttgctgtgattaagataccatttctggccgtaaaaatggccattacctcaggaatggggatggggcgtgcacagtggaaggttgcaggggatcgcttctatgaggaggttatcaccaaagcccgttcgaccagcagtcaactgactagcggggctgatgtcacatataacgttgaaataactgaaaagcagactaacgattatggtacagcgttgccctaccagcctgctaataacaagcatgatgactttttgtatggcagaaaggttgctgcgggccgaattttggtccccggatgggaaacgagatttgagcataatgcgttagcgcaaggccactctgtggtgacaggagcctccggctcgaccaatatcatggttcacctcaataactatattgctagtgaacagattgccagtgaacagcctactttctcggttagacagagctatctcaacacgctggtgtttctggtatttgatggtggtcattctgtcaacgaaagtctggcggtttatcgggcactacaggtaaccgatgatgaacaacgtaagcagttactcaatagctacactgccaattatagggagctggtggatattgccggtgaagaaggcaaagtgtgggtaagccaggcgctggataacgctttccgggaaactggggagttctatcagaaacatgccaaggtgaagccacaaagtcgcccagcggtggaagcgttagactggttatcgggtaagaataagcggccagagcctactatcatcgacgatactcatcaggataaaaaaataagcagactactcggtgattggcaaatggagcaggtgacgccacaagctgatggccgtgaaactcgctttgatggtcagatcattatccaaatggaagatgatccgatcgttgctaaagccgcggccaatctggcgggtaaacactcagattctagcgtagtggttcaacttgattctaagggcaaatatcgtgtggtttatggcgatcttacccgattatccggtaagttacgttggcaggttgtcggtcatggccgtgatacgtcggaacaaaataacattcgcctgagtggttacaccgctgatgaattggcgaccagattaacgcggttttatcaggacgttaatcagggtaaaagcataactcacaaacctgatcacatcagtattgtgggttgttctttgataagtgatgacaaacgggatggctttgctcgtcgttttatcactgtgttagataagcaaggcattcgcagtgatgtttccgctcgcagtagtgaagtggctgttgatgtcagtggacgcaaatttacccgtgatcaaaataaccaatgggttaacaatctgcctgataacaaaatcgtattaagttggtatgaccaaaatgagctgatcacacataccgaactagttcgccgtggtattgccgaaagtgatattaacttctccaaggtagggtataccgaagctgatactgttattaacggagcgatctcgggtaacgttgaactatttgttaaaccaaacaaacgtgaaaatacgattcagattgattccaatgagaaaacgaataatcaactcagttactccggcaatatccaggtgaatgtgggagatggggagtttaccgcactcaattggggaacctcgaacgttggtatcaaagtgggtagcggtggttttaaatcactggccttcggtgataacaatgtgatggtgcacatcggtaatggtgatagtaaacagagcttcgatattgcaggctatcaagcgcttgaaggagcgcaaatgtttatcggtaatcgtaatgtcagcttcaaccaaggtcgcagtaatgacctgattgtgatgatggataaatccattccaacgccgccattgattaatccgtttgatggtgtggcgcgtattgccgatgtattgcaaggtgtcgcgggtgccagtgaggatcaggattggttagcggcacaagatcagcaatggaccattgccggtgcgaagaagttcgtacaggatctctctggcttagaccaaaccagcaatgtggattacaacacgttggttgagctggattcgcaacatgaacgtagcagccgtggtttgaaatatgatgctgaattaaccttgaacaagaagtttaatcagtggctaggggaacatggcaatggcgctgatatgggcaaaataagtcgcatggataagtttcgtcaggctaatcagaagctggccttcaactttgctgtaggcgggcgtggcgcggatattcaggtgacaaccggtaactggaacctgatgttcggtgaccatatccagtcgattctggataccaatctgggttcgctgtttggcctgatgacacaacaatattcagcaactggcatggcgaagaccacctttacctataatccacaggatttgccgcgtcagcttaagaataaactgattggccgcttagcgagtgtaaatgcagataccaccttagcggatatttttggcgtgaactacaccgcagaggggaaaattatttcccgcacaggcgaatcggttgatggtgaggcgattctacaagagatgttggaagtgattggggagtttagcggtgatcaactgcaagcgttcatcaatccagaaacgttacttgatagcctgaaggcgggtattgatatgggcgaggagggcgtcaggtcatttgcggagagtcatggcctgaaacagaaagcgcccgatgagcgtcaggaatcaggatcttcggtgaatatcaatggagaaaatgttcagaccaataataaacccaagcctgcatttggttttaattcgctgaacttacctaatctgtttgcaacgatgttcagcgaagagaagcagcgggagatgaaatcgttagtggctaacctgaaagaaaatctgacgactgatctgcttaatatggaggaaaaaacgtttgatttcctgcgtaacagcggccatctgcaaggggatggcgatatccacgtatcgttggggaactataacttcaactggggaggcgacggtaaagatcttggtacctatctgggcgataacaataacttctggggtggccgcggtgatgatgtttattactcgctagggacttccaatattttttcaggtggtgaaggcaatgacttgggcgtcctgatggggcgtgaaaactggatgtttggcggtaagggggatgataccgcagtggtggctgggcggattaaccacgtgtttatgggggaaggcaatgaccagacatttgtctttggtgaaggcggttttattgatgctggtaacggacaagattacgttgtcaccgctggcaactataaccggatggatactgggaaaggtcaggattatgcggtgatcattggtaataataatcaagccgaattgggtggaggcgacgactttgccagagtatttggcaatgacaaccggcttgatggttattgcggcaatgatgcgattaagctgatgggctaccatgcggtgatcaatggtggagaaggtgatgatcatctgatagccgcggcgatttcgaagttcagccagcttgatggcggtgaaggtcaggatttgctggtattaggtgggtatcagaaccatttccggggcggtgcaggtgtggatagttttgtggtcagcgaagaagtgattgataaccgagtgagcgatattaacgcagaagatatgatcttgtttaacggtgttgactggcaaaatttgtggttgcagcgtagtgggtatgatctggtgctgtcagtgaagcgccatactcaggacaacacggctcaagggagatttgaatcggagggttctgtcatctttaatgattactttaatggcaatcgtgccaaattggtgactcggatgagtgataagaacgcgtcaggggaacgcgaatttacggcattgtcagataatgccgtggattctttgatccaggcaatgagcggttttgctccggcagtgggtgataatggttttattgcgggtctggacagtcaggcgaaaacggctatcgcaacggcgtggactgatgtgacgattggtaaggggaaatttgcttaatcagctctttataaatcagtaaaaaagttttaataaggtggctcacagaaaagtgggccattttggggatttttattcaggaattatttctgagttttatttgttaatgcttttactaattctcggtagattcacataataagtgcaacattgttaacctggaagtaaacacatttgtattcccttaaataattcattcggtgtttctcccgttcctatattatacggaacccgtgagattggtggggcaattatttcagccaggatatataccgaagatcaacaatgatcatacagcaacattttgggttgtgttggttgctatacattttttagcctaaagataaagaatctttaattctttatatatcaggcatatagtttctaactcattgactttattagagttaaccttgtcagggttgcgcatttagaggtacactatatgtgtagattgccagtttggtatttcgaaaaagtcttggaggtttctatgttttgcgaagaaaaagtagcccaaatggctgcctacttgctgtataagcgcggcgggcgcatggcatatctgaagcttatgaagttgctttatctggcagatagggtatctatgaatgactatggctatcctatcactggcgatcgaatggtatctatgccgagagggccagttttatcgcaaaccttaaatttaattactggagattacgccagtgatgaatttgggtggggggcatggattaaaagtgaaaagaattatgaaatttcactcaaacggaaaggtataacaagggatgattttgaatctctttctgatgctgaattagaagttctggatgccatttgggaacaattcggtcatatgagccgctttgatattgtggagtatacccataaacattgtactgagtggcaagatccaggcggcagttcttatcctatttcaccaagttctgtttttattgctgtcggtaaatcaccagaagttgctgagaaattggcgcaagagttaatagaaaggcaacaactggactgttttcttcaaggattgcggtgatgccgggtgggattttaaggaaaggaagtttacttatcccatctggatatacagatcacttatatattatctgctgtgatccagttttttaccctaaaaaaacgaagacatgttttttggctgtaaatattagctctttaaaactggacataccgtatgatcgaacgtgtatattgaattgtggcgatcatccttttattagacatccgagttttgttttctatggtcgcgctgatatttttggctcagtaaccgttgaacagcatatggctgctggtgatattaaaatccatgaaccatgtggtgattctgtttttgatcggattctttctgggtttgatatatctccgcatgtaactttagaaattagaaatttctataaaaaatattgtattaactgaatttcgttttaaatattaaattcaaggctgcacttcggtgtggcctttttttatgggtggaatatggcaaaaaaatcaaaggtcaaaaaggcgatggcggtaagcaacgaactctaattgaggccctagactcaatttaatcaatatctgaggtcaagctactaatagctcttggtgaaggtgaatttattggtggattagatggtagcaatgtctatctggacgatacctctatacccgccatctttcaagttgcctctttgttggctgcactcggtcacatcgttctctatgctcccgggattcgctcccttgccgtcgcgatgcatcttgaaatccataaggtatattgtagttatgccagcaacttcaatctgagaagagcgggttgatctctcctgattgatggaagacttttgttgggattggtatttgttgtaatagacacaaataagattggaagatttgctggtctctaaggggcctgttagccccgattttaggattcaggtcaatattcacttcatattgtgttctacctcctgcatagattgctgcacgaactctgcaaatggcttcacattctttcctaccgaggctgattctaacgctgatagatactgagttctatttttgagtttaatcaccgtccaggggtatcctccgattaccagcaagaaattcattaagaatctggcagtgcggccattaccatcggggaacggatgaatataacccagaaaaagatgccccaagatagcctttaccacaaagtgtttctcagtagcgatcaactctttcagtgcttccatacagtccatcaattgctcgctggagggcggtacatgcattgaagtgcggatatagattggtcctttgcgaaatcccgccaaatccagtctgtcgataattccggcatctacacagggattgaacaacgcagtgaaccagtcagtcaagccaacgtcaatcaggtagtggatgtccaagccttccttatcttcatgtgcttcacgcagtagctctttcaccttgttgaaggcatcgtaatagcctctggcagccattgcatccttctgctccttgtccctttggatggtattcggcgaccagtcacctttagacagacgctcgattaattctggcgtaaccttgtaaccctcgatggatagtgagttgtaggcatcgcttatgtagaggctgctcatcatggcgtgtgttttttcgattgagcgctcaaagaagtcaaaaggtggtggaaagtcatcaaatacctcgacgacttcttgtctcatctcctgccacaagagcctcacacgaactgcgcttggggattctccccgactaccgcctactatcatcggaatatggccaaatgggttaacctgcttaataccttcaaaaccggctccttccatgatggtttgtagtttccggctttcggccctcatctttagctgctggtaggcaccaattaatctgttccctgaagcaacattcttggttgtcagtactgcttctgaaagcagactcagatcagcattcctgagtgctagctgaatgcttatagggttggctctgaaagtttgtgggccagtttcaacgagtgcgctttctaacgaatgaacatttataccgtttactttgacagtcttacagggaacccttcccttgatgatcaccatactcatgttgttaggtagattaagtgtgcgaggcgtcgtgtctgaggtgtagacgattatctggtttggtaaggcattgtttgctgtatgtaaatcaagagaggattcaggacttagccagtaatcatcttcgaagatactttcgacgtactgcccaacgaaagaccagatggattcataccaaagtactgaatcacccgctttttcagtggtgagatctgcatccaggagataccatcctctgatgatttgcttgaaatagcctttattgatcagaagtgtgcgttgtttatcagtgattgacttagaactcagcacgttgcccacggccgcatcgcttgcagctctcagcgcttctgccaacctttcgtttccagtttttgccatgtctttcttccagcagatgttcaagtattagctaatacgggaatacaatattagctattacgatattgaattactagcttttacgaacttacattattagcttttacactcaaatacagtaaatctaagtcctctatcaactgattgctgatggtcaacatgctgcaaaggccaaacagatcgtttgggattttttataactcctcatattgctcaaaccgaattgagttccttcaaagtgctcgactatttgcaaagttatttagagcaaattaaccataatattaataacagtattctttactacaaagttattaatttttttatttaatgttacagatcgcatttttgtgaaccaaagagacgctattatgcatagtgaaatcgcttaacgacggacaaagatgaggttgtagtctatttgtccatataacgataaaacctgctattcaatcttaataattactattcattcagaggtctttatgggcagtaccggaagtgtcagtgcgtgggatgaagcgttattaattgcggctattcaatatcctgttcctattattaggggacctgaagatattcaggttcaagtgcagcagatttgtaaaacaatggattcaactaaagccggttatcctgacttggattttattgtatttcctgaatattctgctcagggattaaataccaagatctggacctatgatgaaatgttattatcgttggacagtccagaaattgactgttttcgtcgagcttgtattcgtaatgatgtttggggtgtgttttcaataatggaacgtaatgaagatccgtcacagataccttataacaccgcgattattattaacagcaatggtgaaattgtattgcattaccgtaaattgcagccttgggtgccgattgaaccctggatgccgggcaatctgggtatgccggtctgtgaggggccaaaaggtgcaaaattggcggtgtgtatttgtcatgatggtatgtttcctgaattggcacgcgaagccgcctataaaggttgtaacgtttttattcgcatttctggttattctacccaagttaacgatcaatggatttggacgaatcgtactaatgcctggcagaacttaatgtataccgtatcggttaatctggcaggctatgatgaggttttttattatttcggtgaaggtacaatttgtaattacgacggtaatattatccagcaagggcagcgtaatccgtgggaaattgttaccgccgaactgttcccgcgtctggcggataaggctcgtgagaattgggcgctagagaacagtatttttaatctcggttgccgaggttatgtcggtaagccgggcggagagagagctaattatctgacttgggtgcgcgatttggcaaacggtgaatataaactgccttgggatgaaaatatccgtattcgtgatggctggaaatattacccagaaggtgtgaaactggggccattaccgaaaatcgatgaataactgacaggttgataatacggcaccgcaaggtcattgtggtgttgttatttttccatcttgaaatccataaggtatagactaatttaattttaaattatttatttacgaaataaaattaatttttatattaattattggctgccctaaatgatttattaaaaataagtgatcatctggaagggattcagttaaatttttgcgatcttaacatccaagattaacggaaatataagtaatcgatattttgataaagggattatcattatgcgaatgcaagttaaaaactgattgaaatgaatggttttcataaagtaattgttgtaaatataatgttttctctttttttcttttctggtatttgattctttaggctcttctattaatgcattcggtaaagatttgcctgagaaaatatgggaagatgttttttgtagcttggtagaaatactataaatggtaatgactaactaataagacagagaaacagattgtggcaaagaaagaaaaacggcctcaccatgacggattatttaaatattttttaacgcagcctgaaacggccagagagtttctatccctttatttgcccgaagaaatccagtcgttgtgtgatttagccacattgaaactggagcccggcagttttgtggatgagcatttacgtcaactgcacagtgatgtgttgtactcggtcgaaacggcccggggacagggctatatctattgcctgattgaacatcagtccacccctgacccgttaatggcctggcggctgatgtattatgccatgttagccatggcggctcacctgaaaaaaggccatactgaactcccgttggtggcacctctgctgttttatcatggtgagattcggccgtatccttactcaaaccggtggctggattgtttcacgctccccgaacaggcggctcgcttataccgtcaggcgtttccgttggtggacgtcagtgtgctcagcgatgaagagatcctgacgcataaaggggtagccctgatggagctggtgcaaaaacatattcgctgtcgggatatgcaggaatggctcctccaattggtggaactcttgaatgcagggtataatacaaccgagcagcgcaatgtggtgttacgctatattttactgaatggacatacgctggatctctcacattttgtccatcaactgattgaacaatctccggagcatgaaacgatgttgatgactattgcagaacagcttgaacaaaaagggcttgagcgaggtatcaagcaaggtattgagctaggtcgagaggaaggtattgaactaggccgagagaaaggtaaagtggaaacggctcgtgccttattacggcatggcgtgagtttggatattattgtcaccagtaccggactgagccgggataaaattgaaatgttaaagcattaaattcatcttctcttttacagcaaaatgccgatattcaagatcggcatttttgttcttattccaggtaatggctatacaaggcacttttacgtttgcccggcgaagctgaaaccggtcaaactgtagtagtgcaaacctcgttagcagtcagagcagggagtttttcctgctctgtactatcagtctaaatccaattccttgagcttcccttttctggttcttaactgagaggtagattccagaagacgattcgcgttggttggtgatctcatcaaataagctgtttcttgcaaagattcgacatcagttaatgacataagtatgcaactttcgccatttttacgagtgataatcactgggctacaatcgttcacgacatttgtcatcgtttcagaaagattttgttttgcttctgagtaagttaacactttcatttatcctacctatgccaagaaataacctgaaaaatacaacgaaatatccattcatcgtatagcatattgtacgattttttttgtatcttgcagacttctaagtttgtaatttgtggtagctaagcgatagcggtcattattatcagattaaccgggatgtaatatgtacattgtgacaagtacaaatatgaacataaacatctttttatagtaatgacatttggctatagttgaacatgacaaatgacggttaagggggttttatgcgagcttatactccctttgctcaacctattgataagacgctttggcgtttcgcaggtctaccaggtaatcgaggacttgatctgactaatgtcctacagtctggtttgcctatagaagtctttgacagcattcacaaatggtcagatatgtctaaagccgacattatgcgtatcgccgggattaaggagcgaaacgttgcccgattaattcgtgtgtttgatgccgcagtacaactttttggcggaaataagaatgaagcatggacatggttaaaaaatcctgtgagggggcttggtgcagttactccaatgtctcttaattgcgactgaaagtggtgcacttgaagtgttagatctcattgggcgtctggaacatggggtgttctcgtgattttctatagaattacgaaaaatcattctccttctttaacctctcttgtctagattaatacccagttaaatgtgaactgggcattttttaacgtcaggatagatagaatcgatattaattatttcaaatgattattattgtaaatatatattatgtttgtgaaattaatattattcgtgagaatatatttttggtgttttaataaagaaaaaataaataattgatcataattagtgaaacgttatatcttatgtgaaagaaaaaagttttctgcgttaaatattgtttttgaatgttggttttgttttatttgatagatttatttgactgttaattcctgcactcagtatttcagataaagcttaatcattgagcaggaatgtttgtttctgccagaatggtcatgctctttggttacagttataacattactaataatttgctctgttatctttttttgctgaggaaagacagaggatttgtattgtttgtgaaatgggatgttcaatgtaatcatgatattcgtcgagggcggttttaacttctattaaactaaaggattgtttatggggaaatcatcaaacaggagcgcggaatatttctttaccgggaattatttcgctgatgacaatgataatgacattgaggccattggatttgggggttacatttatgcctgcggaggaaatgaccatattacgctggggtcgattgccgccaaagtctataccggcacaggtaatgataccgtagttggtggtgcagcatatttatcggtcgaggattctaccggtaatctgaccgtaaaaggtggtgcgggttacgttgatattgataaagatggtgatggtgatatttcgttttttggcgctgcgggtggcgttgttatggatcataccggccatcacggtgatttggactttaccggcacggctatttataacgaaatgaaccgtgacggtttgacgggtaatatgatcttcgaaggttcgggcggttacaacaaattatggcacgaaaccaatcagggcaatttatactttaatggtgctggcgcgggtaacaaaatcgaccgcacttggtatgacaattacaatggaagccgtggcgatgtcacatttaatggcgcaggggctgcaaacagtattagctcgcggatagagagcggtgatattgttttcaatggggccggtgctgataatcacattatacgtagaggtaaagaaggtaatattatcttgcatggtgcaggggcattgaaccgaattaagcgtattcgccaaaaagaagatatttatgcgcagactcgtggtgatatttcctttgaaggtctagggggttataacaaaatttattctgatgttgcacacggtaatattcatttctccggtgccggtgcttacaacgaaatatctagaataggtatgaatgacgattttcgtgatgaggcgctggaatatactcaagttcaagatatcatattaactacagcaacgatgggtggaagttggattcaaaaaaaccagcaagtgacaggcattaaatcaacgactgagcctgatacttatctctttgcgtttgttgacgaaatgtatacaaaaatcagcaaaattcagctccaaaatgatcccgaaaccggtaagctcaattattacgccacctcttggtataaggaaggtaattaccttaatggtctcgcttcaacggaaatttcttctggtaatggctttgtcaataccaataccaacgatgcttatcgtctttttaatttaatgattgaacatcaccaaccgatcactattcatgcggttggagagggtttgtctgaaaacgagtgggttatttgtgctggcggggtaatagtcagggcggaagatattaccctctttgaggcaaagatgggagggtatgcgatcttttctgatcgtcagaaagttgatgttgccgcgatgagatcgaatcgtcaaccaaatacgtatgtgtatgccaagtatctggaatcatgcactaaagtagtggtagttaaattggaaaatgatcctgttacgcaggaacttaaatattttgccagcgcgtggtacaaagcgggtgatcataccggtaatttggcaaatgaagatatttcgctggcgaacggttatcgcgctataaatgcgggtggctgcacactaagtcaactgcaatatagtcttaatacaacaatacgtcgtgcttctgatcgattagcgcataccgaagagtatcgtcagcaagaacttgtgaactcatttgcccgtaatggtgagagctccggtgatattcaatttagtggcgctggcggtggaaatattattatatccagcgtcacgcaaggcaatgttaattttaacggtgctggtgctgctaacgtccttgttcatcagagtcagcgtggagaaatggatgttaatgccggaggggtggcaaatgttgtggtgcgggttggggatggacgatttctggctcatcttttggcagtgggtaatatctcgatccataaaggtaatggtaatagccgggtggtgatgctaggtggctacaatacgcacacgcagataggcaagggtagagcgagctggttaggtgccggtggttttaatgtcatgacccaaaaaggcagtggccgtgtttcctcggtattggtgggtggtgccaatgtcctgactaagcttggtgccggtgatttggtttccggtatgctcggtggcgctaacgttatcacgcatatcactgatgatgccgaaatgtcgaatacccgggcaattgcattgggtggggctaatgttcttaccaggaaagggcatggtgatgtactagcagtcatgggcggcggcgcaaacgttctgactcatattggtaacgggaatacgacaggtgtgatgctcggtggtgccaatatcctgaccaaaataggagacggcgatactactggcactctgtttggggtaggtaatgtactgacccatgtcggtagcggccagactttggcggtgatgggggccgcaggcaatctcttgaccagagtcggggatggagttgtgattgccgccatgattggtgcaggcaacctatttactcatgttggtaaaggcgatatatgggcattgatggggggtgcagtaaacatctttactaaagtgggtgacggtaatgcgttggcactgatgatagccgcaggtaacgtgtttacgcatattggggatggtaccagtgttgccctgatgctggcaaaaggcaatgttgcgactaaagtgggtaatggtatgacgctggccgcaatgattggtggggccaatatctttacccatgtcgggaatggtaatacttttgtggctatgatcggtggggccaatgtgctgaccaaagtcggtaatgacctgaccgccgccttaatggtagggaaagccaatatctattcgcatgtgggcaatggcaccagtatcggtttgtttgccggtgaactgaacgtgatgacgaaagtcggtgatggtacaacgttggcggccatgtttggtcaggctaatatcatgacccatgttggcaatggcttaaccggtgttttggcattaggagaagcgaatgttgttaccaaaactggtaatgattttatgggggttgttgcgggggcgaaagcgaacgttattacgcatgtaggcaactcgatgactgctggcgtactgcttggcgaaggtaatattctgaccaaagtgggagaggggacaaccgtcggcttgctggtgtcgaatgtggggaatgtcatgacccatgttggtcatggcacaacggtggggtttgccaaaggtaaagccaatatcatcacgaaggttggtaatggtaccggcgtaaatgcggtttggggtgaagcgaatatcctgacccaagtgggaagtggtgaccgttataacttcgcgaaaggtcaagcgaacatcataaccaaagtgggtgatggacaagaagtgacgatcgttcagggtgacgccaatattatcactcatgttggtcacggtaatgattacactggcgcttggggcaaagcgaatgtcattaccaaggtcggtgatgggcgtaatgtggtgttggctaaaggtaaggctaacattgtcactcaggtaggtaacggtgacagttttaatgccttatggagtgaaggcaatgttgtcaccaaagtgggtgatggcatgcaagtcaccgtggcaaaaggcaaagcgaatatcaccaccactgtgggaaatggcttaaatgtaacagcgacgcatggcgacctgaatgtgaataccaaagtgggtgagggtgtttccgttaacgtggcgtggggtaatttcaatgttaatactgaggttggtaatggcctgaatgttgcggtgatgaaaggtaaaaataacaccaatattcatattggtgatggtctggggatgaatgcctcttatgcacacaataatgtggcgattaagattggcaacggtgatttctatagtttctctgttgcagaaagcaatacgcaaagcaacagactctcttccttctttgaacagatcaagcagacagcgttaggtgtagggggcagtcaggcgatcaactatctggttcagggcggtgaggctaatacgtctgggatgcacaaaggcagaggggcgattcatttagccgaagtttctgctattgatggttttaagatagatgaaattgcgccggtaagttcagatttaagcggtcgtttgagaggttctgtaacagcggtcgaaacgcctgagctcggaagtatccatgattcattgaatattaacgaaagcaatgctccggggcaggaagccaatctgatcatcaatggtaattttgaacaagttaattatggctggctgacaactaatggtattgaagcatctcactcagccggtacttatggtcttgataacaaggggcatggagaacgcgtcagtgaacttgatgcggatgtgaacaccacgatttatcaggatttacaaaacttgttcgaaggagaagttatttcactgagctttgattttgccaatcgtcataatgcttatcttactaacaatggcatggatgttttctggaatggtgaacgggtattctcaacttctggagatgtcgctggatggcaaaacaaaacgttggcgctaacagcaaaaacgggtagtaaccgaatcgaatttaagggtacaggtttaaatgatggcgtaggttatattctcgataatattgttgcgaaatctgagagctcactacccgccaagtctgttatcgaacaggcgaaacaggataatgcggcgcaaaatgcgttaagtgataaagatagagctgaagaagatcgccgtctcttagaacaagaaaaagagcagcaactggcagcaattgcaggaatgcagactcaactggaatcaacagatcaggcagcgctaaacaccaatgggcaagcgcagcgtgatgcggtaaaagaagaatcacacgcagtaacagatgaactgctctccatgactcaaggtctggatgcactgaatgacgttgataattaccacggtaaatcaggtaaccaatggcgtaatcaatttgccgctggattattgaacaatgttcagagtcaatgggaacgcaccaaatctactacacaggaagagttatttaatgctcagcaaaatgttaccgataatcaacaacaagtaaaaaaagcgattgcgcaatcggaggctggtgtagcgaaaagtgagcagcatcgtattggtgtgcaacaagatgtcatagatgcttataaaagaataaatttgaaagcggtacagttacaacaacagcgagcagaaaaagccaaaaatgaggctaacgttgcctaccaagaggcggagaatcgaggcaaacaggatattgccgtggctgaggataaagtggttcaggcacagactaatgcaaaggaagcgaaacagagagacaatgctaaaccgcagcgagtgggtgcccttggcagtggtttgtctggagaggcttaccagtccacggctatagttgaaactagcagttatgttaaccccgagtttgttgtacaggcagatggacgattcagtgcaggattgatggaagaagatctggccgtactgaaagaggcaaaaaacaggattaatcagttgccggtcaataagctagcactgttggataaaaatctgctgacaacatcttctcaacatcgtggggcaatcaaaggggatgtgctacaaaaaattgataataagatcttcgaccttatcgcgaatgggaaagcgctggaggcttattcattccattttagccaggatggtaatgtgttggaaaaaatcagcaaaatcatcccggaaattggcagtgtgctcctgactaaaggggataccgctgagtctaaaaagttcatgcaaggattgtgttttgctttatctgcccgttacttaatggaagaacgtgtacagggttcagggggaggtaaagcttatatgttgtggttaaaagacacggtaaaagcctataacgacaaatcagtcaataagaaagccgatattaacgccattgaatcggctttgttgattcaatatcgccgtcaaaatattgggctggttattgaagatttattatcgatgcagtacagccagtctatggatagctctacccctgaagcttatagaaaagcgaatgctgcttatggcggcaaattgaaagctaatggattggccgggccgaatattaataatgcactgaattactctgttgaaggctatgaatccgtcatggataagttgcgtcatgtgagaaagtcgacttacatatcattcatgtctgaagaacatgccatgtccgttgtggtgcataaaaaacttaatcaaacagtttggtcattttatgatcctaattatggtggtaaatcgtttgctaactataacgatttccgccgttttatggatacgtttcataaagggtttataacgagttataaattccaggcaagtaaagagtctggccaaagcttttatattcactttaataagtttgaagagggaaccattgcgagatatgacggcgtttggaaaacgtcacgtgatggtgaacaaaactacgtattgcgtgcattgaaagagcaaggcacggtatttaacttaggttcaaacgtcactgggcgtgtcattgattaccggaaaggtgatatcaccttggaagtaacggctaagcaaggtaaacaaacgaagaaggttctggttgacgttgagagcaataactttaagcaagctgccagctttgtgcagtcgaatatcaataaagtcctctcttatccggcagcaaaccggctgatactgaaagtgccggttgagggggatgcggcaagccccttactggaaaaatggtcatcaagtgacgcgatcaaaaataaaaatgcagaggcgtgggagcaggtaaccgtcaccccacaaaccgatgatcgtacaactcgttttagtcatcaggtcattattcaaatggaggatgacccggtcgttgccaaagccgccgccaatctggccggtaaacacccagattccagtgtggttgtacaactcgatgctgacggtaaatatcgtgtcgtttatggcgactctgccagattatccggtaagttaacccgaattctggataagaaattgacgagaagcctgttccaggagcaaagttttggtgtgcaccaaaaacagctccgaggggggaacaggctatggacaacttagttgaaattttctgtgatgtcgatgatttttgccgttttttcatccctcaatgggaacaattttgtctcgatagcgggcatcgtttacgccgccgacaaggtcatatgtatcccagtgaaatcatgaccattttgatcctttttcatatgtcgcattaccgtgattttaaacatttttatctagaacatatttggaaatatcaccataaggattttccaaccttgcttagctatcctcgttttgtcagtgtggctccttccgttttggtgccattatgcagctatctgactcaattaaaagggaaacccacaggcattgcttttattgattccacccgtttgagtgtctgccataacattcgcatccctcgacataaggtctttgcggggatagcaaagcgcggaaaaaattcaatgggctggttttacggtttcaaattacacctggttgtcaatcatcagggtgaaattctcgcgcttaaagtgactccgggtaatgtggatgatcgggaacctgttcgtgaattatcaaaagaattaacgggttctctttacggtgacaaaggttacctcagccaggaattggcggacgatttagctaaaaccgatgtcactttcatcacgaaaaaacggcgtaacatgaaagcgagtatgcaagctgagtgggataagataatgttaaaaaagcgttttatcattgaaacgattaatgggcaattaaaaactctttctcaaatagagcattcccgccaccgaagtataaaaggctttctgttgtgcgttttaggtggattgattgcttactgccttaaattgaagaagccatcactgaaagttttctactcagaagacgatttttcaatgacggattaagcagaattcgggttaagttacgttggcaaattgttggtcatggccgtgatacgtcggcgcaaaataacattcgcctgagtggttacactgccgacgaacttgctgtgagactaaagcagttcagtcacgatcttaaaccggtgggcaaacttgaccatatcagcctcgtggggtgttctttgatcagtgatgataagcgggacggttttgctcgtcgctttatcacagcgttagataagcaaggtattcgcagtcatgtttctgcccgccgtagcgaagtcgcgattgatgcaacaggccgtaaattgacccgtgatgcaaacaaccaatgggttaataacttgcctgataacaaaattgtattcgaatggaataaacagggtgaattgacgccccgtacagaaagggtgattcgcggaattactgaaagtgacatcacccttgccaaagtgggatataccggtgctgatgtggtgacgagaggggcagttgcagattatcgttatccttttactgcgccaaagaaacgtgaaaataccattcagattgacgccaataataaatcgaataatcagcttagctactccggcaacattcaggttaatgtgggtgaaggggagtttactgcgctcaattggggaacatcaaatgtcggtattaaagtgggtaacggaggctttaaatcgctggccttcggtgacaataatgtgatggttcatctcggtgacggagatagcaaacacagcttcgatatcaggggttatcaggcgcttgaaggggcgcagatgtttattggtaatcgtaatgtcagcttcaatcagggcagcagtaatgacctgattgtgatgatggataaatccatgccaacgccgccgttggttaatccatttgatggcgtgatgcatgtcaccggagtactacaaagtattgctcactttggcgaagaacgggatgggttaatcgcgcaagatcagcaatggacactcaccggtgcgagcaaatttgtacgggatatgtccggtttggatcaaaccagcagtgtgaactacaaaacgctggttgagctggatttacagcatgaacgtagtagccgcggtgtgaagcgagatattgaaaccacattgaataaaaaatatcaccaatggctaacctgcaatgtgactgatatgggcacaatgagccgcgcaaatagattccgtcaggctaatgagaagttggcttttaactttgccgtcggggggcagggggcagatattcaggtaacagccggtaactggaattttatgttcggtgaccatatccagtcgattctggataccaacctgggttcgttgtttggcctgatgacgcagcaatattcggcaacgggtatggtgaagactacgtttacctatcatccgcaagatttgccgcgtcagcttaagaacaaattgcttggccggttagccagtgtaaacgaggagacgactttagcggacatttttggcgtcaattataccgcagagggacaaatggtttcctgtacaggagaaccggttgatggcgaagcgattctgcgagaaatgctggccgtgattgcagagtttagtggggatcaactgaaagcgtttacaaatccgaagaagttgcttgatggtttgaaagcgggtatggatatgggggcggatggcatcagatcatttgcagaaagtcatggcctgcaagggaaagcgcctgacgaaaaccatacaccggaatctccagtgagtgtcgatggaaagcgtgctcaggccgatgataaagcaaaacctgcatttggctttaactcactgaatttgcctaatctgtttgcaacgatgttcagtaaagataagcagacagaaatgcactccttagtcacgcatctgaaagagaacttgacggctgatttgcttaatatggaggaaaaaacgtttgatttcctgcgtaacagcggccatttgcatgatgatggcgatatccatatctcgttggggaactataacttcaactgggggggtgacggtaaagatcttggtgcttatctgggcgataacaacaacttctggggtggtcgcggtgatgatgtttattattcaattggtacttccaacctctttacaggcggtgaaggagatgatctgggcgtcctgatgggacgtgaaaactggatgtttggcggtcatggcgatgataccgcagtggtggctgggcgaattaaccatgtatttatgggtgaaggcaatgaccaggcatttgtttttggcgaaggtggttttattgaggcgggtaacggacaggattacgtcgtcgcttccggcaactataaccgggtggatagcggtgaaggtcaggattatgttgtcaccatcggcaataataaccagattgagttaggtgaaggcaatgattttgccagagtatttggtaatgacaaccggatcgacggctatttcggcaatgatgcgataaaactgatgggctaccatgcggtaattaacggtggagaaggtgatgatcatctgatagccgcagcgatttcgaagttcagtgagtttaatggcggtgatggtcaggatctgctggtgctgggtgggtatcagaaccgcttccacggtggttcgggggcagacagttttatggttagcggagaggtgattgatacatcggtcaatgatatcagcgcagaagacatgatattgcttaataacgttgactggcgaaacctatggttgcagcgcagcggatatgatctggtgttgtcggtgaagcgccaaactcgggacaacgatgctcagggggtgtttgagtcagtaggttcggtgacatttgataattactttaatggcaatcgtgccaaattggtgactcagataggtgataagaacgcattagggaagcgtgaatttactgcactgtcagataatgtggtggattctttgatccaggcaatgagtagttttgctccgacagtcggtgataatggttttattgaggggctggagagtcaagcgaaagtggctattacaacggcatggaccgatgtcacgattggcaaagggaaatttgcctaattaacttcatgataattaagtggctcaagataagtgagccacttttatcgctaattaaccggttttctacattaattccgtattagtattaaggaaatgatgaattgcctttaacactgcgtcgggtttttctgcgtgaacccagtgatcgcaaccggcgataacccaagctttggcttgtggaaattgtctggtgatattattccggtactcttcctggatataagaggaaaggccgccacgaataaacagggcagggcgaggccatgtagggatttcttgccagccgatgatcttttcatactggttaattaataccggtaaattgaatttccattccccctgatggaatgatttcagtaaaaactgaatgacaccttcttcctgaatattttctcgcataatcttagcggcgtcttgacgggatttaactccggctgctgtcactttgttcagtgcggtaaaaatttggtcatgacggtgaacctgataggcaacgggggctatatcaataagaacaattttttctatccgctctggtgctagtgcagtcattgccatcgcgatcttaccgcccattgaatgaccaataataatggcggactgaatttgcagatgatccagcagggaaataacatcttgtgccatatcgtggtaatccatgttatttgcccgtggagataaaccgtgattgcgtacatcgacttgaatgacgggatagtattgctgcaaatcacgagccaaaaccccaagattattgagatcaccgaataacccgtggattaataccacagggataggagagagcggattttccggtatctgcatatggtagtttaatgggttgactaatttcatgatgagaattgttttctttcaggtattgatatcatgccgtgtatattgttgcttaaattataaaaaagcaaccaggctgtacaattatagttaataatttcttataattacatcgttctcaaaatgttcatgtatcaaaaacttgttaatttttctatagtaatacttaatgaattgaaaaataaaggttcttcgaataaataatatttttaaatggaaagttttaaataacttgtgagatgattattggttcaatcatcttagtggggttattgattgtgtgtttatgtgatctatatcttaaaaaattgtgtgttaattttaattttttgtgaaaaaataatgaaaatttactttatattttattaaataaaggtataaagtgcatttaacaaaaactatatcgttctaataagaataaatagaatctgatttatactatggattagggaattaagaagtgaagaaaaatttactaaagagtctttattttcaagttttgctcgcaataactatcggtatacttctgggtcatttctatccggagcttggtacagaaatgaagccattgggtgatggatttgttaaattaatcaaaatggttattgctcctgttattttctgtactgttgtaactggcattgcaggtatggaaagtatgaaagctgttggtaaaacgggcgctattgcactggtgtattttgaaatagttagcacaattgctttgattattgggctaattgttgtcaatgttatgcagcctggtgcagggatgaatattgatccctctacgttagatgttaaagcggtatccctatatgcggagaaggctgctgaacaagggataatagcatttttacttgatgttattccggccagtgtcatcggggcatttgccagtggtaatattttgcaggtcttattatttgctgtgttatttggttttgcacttcatcgtttaggagagaaagggaaaccaatcttcaatattattgatggtttttcgcatgtcattttcggtattatcaatatgataatgcgattggctcctttaggtgcttttggtgcaatggcatttaccatcggtaaatatggtattggtacgttggtacaattaggacaattaatagtttgcttttatatcacctgtattctttttgttatatttgttttagggacaattgcaaaagcgacaggatttagtatattccggtttattaattacattaaagaagagttattaattgtattgggaacatcatcttctgaatctgcattaccgcgtatgttagataaaatggagaaagcgggatgccagaaatctgttgttggattggtaataccgacgggatactcttttaatctggatggcacctctatttacctgacaatggctgcggtatttattgctcaagcaacaaatactcatatggatattgtgcatcaaataacgctattggttgtattacttttatcttctaaaggtgctgctggcgtaacaggtagtgggtttattgtattagctgcgacaatttctgctgttgggcatttaccactagctgggctggcattaatcttgggaatagatcgtttcatgtcagaagcaagagctttaacaaatctgattggcaatggtgttgcaacgattgtggtcgcgaaacgttgtcgtcagcttgatgaaggcaaattaaacgaagtgttaaatgccaaataagcaaaatctttaggtttttatctattcgatgaccaattaataaaatgatgccgacctttggtcggcattaattctaatcaataatagagtaccgtgtaatttgaaaaagctgactatttgaatggatagcatttctgtattgtactgattattgatatatgtgatttatttcagttgagatgtagcgaaaggtttcaaagaaatggatagggcaacataagcaggttggtgacaatgtggtcaatattatctctagagttgggtgttttggtagtcagtgctggagagtggtcttgtttacctgaatcagataaagaaatcaggttttatagggtggcataattaggtatataacgcgtaattaaggaagatgaataacaaaacgccatgtagggcttacattgaatagcacaaaatggtaaattaactaaacgtcaacaacttaataatatgaaatgtttaaaaaattaactttaccattaactgccatatttctttctggatgtgttcacactactcctatgcctgttcaaatatcacaacctggtgacaatttgatgtcatgcgagtctgtcatttttgaaatggagaaaatgcagaatcttgttaaacagaaggatagtgaattgaatggacaaatagcgaaaaattcagccttgggtgtcactggagtgtttttgctgattccgcttttcttcatagatactagcgatgcaaaaacggtagaaggaaaggcagcaaaagataggtacgaaaaactacagcaaatctatcgtgataaaagctgtgcagagaaagaaaaaaagtaaaaattctattttgaataaaagcgccaagtaaggcgcttattttttgtatggataagagaatcaataatgattgtatttatacccttcatctttcaagctgctgctttgttggctgctcccagtcacatagttatctatgctcctggggattcgttcacttgccgcctcgctgcaactcgaaatctattaggtatagattccactaaacaaaaacggacttgcttagacaagcattgaatttatttacatgatttaattggaaaaatctaagttcattaaccttggtgggatgtgcttctggcgtcccctgctggaatcgaaccagcaattagcccttaggaggggcttgttatatccatttaactaaggggacatagctttattataacggcttttcattcataatataaggcgttataaactgtttgcctatttaatgatcgcttgaattgagtaccattcaagttggattgtcagtaatatttacattattgatggtcatcggcgagtcgtgcaacaaactgatctgccggatctagaaggttattacttggagagatgtatgaagtatcgtttgggcggaatcgctcttgccgccgcattactagtgggatgcgctaattcatctgatactgttgaacaggagcgttcagacctattggaaggttttaaccgtacaatgttcaactttaattatgatgttcttgacccttatgttttacgtccagtcgcggtagcgtggcgcgattatgtgccgatgcctgctcgaaatggtttgggtaattttctgagtaatctcgaagagccggctagtatggtgaacagttttttgcgcggtaacccatatcagggaatgaaacattttaaccgttttttcctaaataccatcttgggtatgggggggctgattgatgttgcaacgatggcaaaccccaaattggcaaaagaagagccaaaacgctttgggagtactttgggctatcataaggtggggtatggcccttatgttgtattaccgggctatggcaattttaccctacgtgatgaagggggtaactgggcggatatgacttatccaatgctgagttatctgactatttggatgtcagccggaaagtgggcatttgaagggattgaaacccgtgctcgtttactggattctgatggcttgttgaagaactcgtcagatccttatttgatgatgcgtgaggcttacttccagagtcatgattttatggcaagcggcggtaaactgaaagccacggaaaatccaaatgctgaagcattacagggtgatttggatagcattgattgatatatccgttatctttcaagttgcctctttgttggctgcattcgctcaccccggtcacatagttatctatgcttccggggattctctcccttgccgccgcaatgcatcttgaaatctgtagggtataaatctttatttggtgttgaactgcgtagataaaaaaggatagcaatggagctatccttttttagagtggcatattgttagaatgcgtagttgaagttcacaccatacaaccaggcagaacccttagcttcgaattcgtatgcgttaggtaacgcttcagacaatttctctttaacagtgactttctgaccatgcatatatgaaacgcctacatcaacggaagcatctttgttaaatgcgtaggttgcacctgcactcaaccagaaacgatcttgatctggaatggagatagaacggttttcagcaggaatcgggctatcgtcaaaggcgatacctgtacggaatgtccaattgtcatcgtgataatacgttgtacctaaagcaatacggtaggcatctttgaagccttcatgtttactaaacaaaactgcaccgtctttttttctggtccctttcagttcattaaattcactccagcctgcatatgccaagctatagtgaatagcccatttaggtgctacgcggttgtaaccggaaacctcccagatatctggcaaattgagatccaatctaccgccaatggtttggcctccagtagcaggtaaattcactcccgctttttgcagcatttgacctagctgaacaggtacgtcatttttatagtcaccgtctttaaacttaattttaactttagagcggtaagtcaggctgtaacggttattttcatccacttcatacataatgcctgcgttccagccatagccccaatctttaccttccagattagcaacctcatctgttggttttacgagaccttttggcatcttggggtgctgatccagcatgtatgacagagcgcccgcatgacggacaatttttgcatccgcataaacagcgttcagtcctaaaccaaagctaaagtgatcgttcaggcgataagctccgctcagattgaagttcaacgttgtcaggtcagttttaccgccgatagggcctgcttcatagttattgctaaaatcggttgccaggccgaaattggtggtgaccgaggtaccaacaaaccattgatcatcgattggcataatgaaatgtatgttaggtatccaagcggtaggagcaatatttttagcgttagtacttttgcctgttactggggatttaccggtaatatcaacatctgggttgatatagacggcgccaatagagaatgatgggcgatcaaacagtgtcattgctgctgggttacggcttcctaccgctgcgttatcagcaacaacgccttccccggaaaaagcgcggcccaaagccgaagtagaaaattcatttaactggaaaccagcagcgccagcattcgatgaaattattgccactgcaaccgctaatgctgaacgggtgaacaggtttttctggttcataaccaaaaccctcttgtttattatttaactatgccacttatcttagcaaggagcgcaggattgtaggatcggtttgtcttgatgacaaatcagaccagttgtgaagtataggtctgataacagttggtgttgcaagaatgtttttaaaatattaccaagttgatatcaaaaacgcgactcagttaacaaaaaaatgatttttgatattaataaaaacgtttaaaaacgattttttaagatcaaatttcggcagataaatattctgtaagaggtagtgtgagtttcccggtagttaagagggataagatattaaaattcattatgaatattttagtaatgaaattatggctggtgtaatagacccgtgtcgcaaaaagaagcttgagaacatgttcgaataagtattgaaaccatttagttattaaataaattaaagttgcgcttcctctcatttttgatttattccggtttgctatttataaacattacgctaacaatgatctatcaggtcagacctgtctaggttggttgaagcgttttttcagtaatttgattcagttaacgataatctttcaggagccgttatgagtcgtccgttaacaaaagtgacacagcaaggtgatcgtatcgccattgtcagtgggctacgcattccatttgctaaacaggcaacatcgtatcacgacataccggctgtggatttgggtaaatcagtcgtcagtgaacttgtgactaggagtggtttactccctgaaaagattgaccaactggtgtttgggcaagtagtacaaatgcctgaagcgccgaatattgcccgtgaaattgttctcggtgctgggttaagtgtgagtactgatgcttacagtgtatcccgtgcatgtgctactagtttccaggcgattgccaatgtggctgaaagcattatggctggcacggtgaatattgggattgctggtggagcagattcctcatctgtattgccgattggtgtgactaaatccttggctcgtactctggtggagatgaataaggctaaaacgctatcgcaacgccttaagttacttagccgccttaaatttcgcgatttattgcctgtatccccggcggtagcggaatattcgacaggtctgcgtatgggagataccgcagaacagatggcgaagacttaccgtatcagtcgagaagaccaggatgcattagcacatcgctcccatattctggcagcaaaagcttgggaacaggggttgttggttgatgaagtcatgacagctcatttccctccataccgtgaagcattgcttgaagataataatattcgtaaaaattctgtactgacctcttatgcgaagctgcgtccggcatttgaccgtaagtatggcacggtcactgctgcaaacagtacaccactgacagatggtgctgcggcggtcatattgatgcgtgaatcagtggctaaggcgttgggaacaaaaccgcttggttatctgcgtagctatgcgttctcggccattgatgtctggcaagatatgttattagggccgtcatacgccacgccaatagcgctcgatcgtgcaggtattacactgaaagatctaactttgattgatatgcatgaagcttttgcggctcagacactggcaaacctgaaaatgtttgccagtgatgaatttgctcgtaataaattagggcgtgctcaggcaattggtgaagtcgatatggacaaatttaatgtcttagggggttcaatcgcttatgggcacccatttgcagcaacaggagctcgtatggtgacgcaggtattgaatgagttgcgtcgccgtggcggtggccttgggctgacaaccgcttgtgctgctggcgggttgggcacagctatggtattggaggtggaataatgactcaagctcagcatgatgctgcacccatcactacgggtacaaaccaaactgcttctgttttcagttttgacgtcaggccagataagataggcatcatcaccattaatgtaccgggagaaaaggtcaatacgctgaaagcagaatttgttgatcaatttctgaatgttttcaagcaagctcagcaatcttctggtcttaaaggattaatattgatttccggtaaaccggatacgtttattgccggtgctgatatttctatgattgccggatgtaagaccaaagaagatgcgcgagatttggctgaaaaaggtcagaaactattttctcagatagccaattaccctttgcctgtcgtagcagcaattcatggcgcttgtttggggggcggtttggaattggcgcttgcatgtcattggcgtgtatgttcacaggatgataaaactcgtcttggattaccggaagttcaacttgggttattacctggctctggtggtactcagcggttgccaaggcttattggtgttagttcagcgttggatatcatgctgacaggtaaacagctacgggcgaaacaggcattacggctcggattggtggatgatgctgtgccgttggatattttgctggatattgctatcgaaaaagtcaaaaagggtattcctgtgcgtaagcctttgccgtggcaacagcggctattagttggccccgtcggaagatactttttgtttaatatcgttcgtaaaaagacactggcgaaaactcgtggacattatcctgcacctgaacgaattattgaagttgtcaaagaaggtcttgaaaaaggtatgagccagggtttacgggctgaggcggtggcatttggtgaattggcaatgacacgggaatctgctgctttacgtaatctgttttttgctgcaacttcgttgaagaatgaaacggggtcatcagagaagccggcgaagatcaagcacgttggtatattaggtggtggtttgatgggtggaggcattgccaatgtaacagccacccgaggcaaactaccggtgcggattaaagatattaatgaaaagggcattagtcaggtattgaaatatacttgggatttgttgtccaagcgggtgaagcaaaaacgactacgcccggcagagcgtgctcaacaaatgatgctgatttcaggaacgacggattatcgtggtttcgcacaaactgatattgttgttgaagcagtgtttgaggatttgtcactaaagcagaaaatggtggcagaaattgaaacgaatgctaaaccagaaaccatatttgcatctaatacctcttcactacctatccatcagattgctgaaaaagctcaacgaccagagcaggttattggtctgcattattttagtccagtggataagatgccgctggtggaagttattccacatcaagggaccagtgagaaaacgattgctacagccgtttctttggcgaagaagcagggtaaaaccgcgatcgtggtgggtgataaagccgggttttatgtaaaccggattcttgttccttatatcagtgaagccgcgcattgcttggtagcaggagaacctattgaccatatcgatggagctctggttaattttggttttccggtagggccgattaatttattggatgaagtaggtattgacgttggcaccaaaatcatgccagttctggtagaacaattaggcccgcgttttgctgcacctgaatctctcgatgctgtactgaaagatggtcgtaagggtaggaaaaatggccgtggtttctatttatatgccccagggcccagaaaattctggcagtttggtaagagagacaaaaaagttgatagctcagtgtataccttgctgaatataacgcctgagtcgcatatgctctcgtcagaaattgctcaacgttgtgtgatgctaatgcttaatgaagctgttcgttgcttggatgaaggcattatcagaagtccacgtgatggtgatattggggcggtatttggcattggttttccgccattctttggtggtccattccgttatattgatagccttggttgtgccagagtggtggagattctgcgcaggctggaaagccagtatggagacagatttgtaccttgtgagtgtttagtgaatatggctgaacagaataaaagtttttatccatagtggcttgtactgtattgatgaaaagagggattccggtgccgttggggctccggaatcatattgagtgtttttgaataaaaaagatctctttatataccctatggatttcaagatgcatcgcggcggcaagggagtgaatccccgggagcatagcaaactatgtgaccgaggtgagcgagtgcagccaacaaagaggcaatttgaaagatgacgggtatagattcaagcaacatctattattgggttgtcgttcaaccattttatttatttttgttttgagtagaatgcttgttcaccctgtctgaaatgtttttgtagtaacaatttttattgtataactcagattgagattactgatatttattatcagaagtataactgcacttactcattcatacggtggactatgcaaatttttattatgcgtcatggtgacgcggctttagaggcaattagcgatgctgcccggcaactcactcctcgcggttgtgatgaatcgcaaaaaatggcttgttggttagcacagcaaaagcatcagattgatctcgtattggtgagtccttatattcgcgctgaacaaacgttacagattgttcgtaaatccttatctttgccggatggtgaagaggtgttgttggggttaacgccgtcaggtgatgcgactacagtgagtagttatctccagtttcttgctgagcaaggtcataacgctattttagtggtctctcacttaccattagtcagctacttagttgctgagctatgtccggcagaaacaccaccgatgtttgcaacttctgcaatgatatgcgtggatttaaacagccagactggcaaagggactcttgtctggcaggtcagcccgtctcaattggcagcaaaagcctaatgattcagcggcgtattggctcaaggctcatcaagttcgataagtatcaatagtgcggcgttacctccccattcctttggcgcttgatggaaggctatgatatctgggtgttgggctaaccacagaggtgtttgctgtttgagaatgtgttttccgtggccgtgcatgatgcaggcacaatagacatgttcacgacggcaagcagcgatcaaggctccaatttcctgtttggcttgcatttgagttaatccgtgtaaatcaagaaacagttctggcgaatagtcacctcgacgtaatttcttcaattcataatggtttgtatctccccttacgtaacgggtagggccctcactatcaaggttgggttgaaattcatcagaaaaatagtagctggcatcaatttgctcttgctgaattcgttcaggggcaatatagctggttttttttcttctgggagaatgtaagacggtatcttggttgatgcgtttagtgcctgctaccgattgttgaaataagtgaatctcttcctcattcagggagtatttatttttcatcattgctcagttaattaaaccattttgtgacaagtgtactgcatctttttaactattaaacctgattatatttaataaaacctgattttaccgagtttgtggtttaaaaatgctgataagaaggtatatccaggtagttaataaaataatttgacaatgacagttggttggaaaataaatgtatatacaattaaaaacctgatttataccctatggattaagaggtaacttgaaagatgacgggtatatcagatacagaccaatacaggatgctgatcatggtaatagaactgcgtgatactgatatcatctggcgtaatgcaagactggcaacaatggatcctgctgtcaatgcagcttacggattattaaaagaatatgatcttgtcgtgcgtgatgacaaaattttagctattttgcccaccgcagcattacagacgagtcgttgtcaggtcattgatgttcaacaacgcttaattacccctggtttaatcgattgtcacacccatttagtgtttggtggtaaccgggcttatgagtgggaacagcgtttaaatggtatgtcctatgctgaacttagtgcccaaggaggggggattaatgcgacagtgtctgcgactcgggccagttctcatgaacaacttgagcgttctgcgcaacagcgtcttactgcatttatggccgaaggtgtgaccaccattgagattaaatcgggttatggattaaatctggaaaatgaagaaaagttgctacaggttgtgcagcacttagcgcaacataacccgatcgagatcagccctacattgcttgctgctcatacttgtccacctgaatataagcataatcccgatgcttatatggatctgatttgcgaagatatccttccacaactttggcaaaaagggctgtttgaggcagtagatgttttttgtgagagtgtaggatttaatctggcgcaaactgagcggctctttcaggcggcacagcgttggaacattccagtaaaaggtcatgtggagcagttatctcatttaggcgggagtgaactggtcgctcgctatcatggtctttctgtggatcatattgaatatttagatcaggcgggagttgagtcgctcagtcacagtggtacggtagctgttttgcttcctggtgcattctactttttgcaggaaacacggtgccctcctattgatttattgcggcaatttaatgtgccgatagccgtatctaccgattttaatcctggaaccagcccatttgcttctttgcgaatggccatgaatatggcatgtgttcaatttggattgactcctgaagaggtatggttaggtgtaacccgacatgcggctcgtgcattgggcagagaaccgcgtcacggacagttgcgcgcaggagcttacgccgattttgtggtctgggatgcagagaatcccgttgatattttctatgagttgggtcataaccctttgaataccagagtgtttcgtggtgttatgactcattccagcatatataacagataaggagcggtaaatgaatttatggcatgctacttcgccgactatttggcaaggacgaaatgatttggcagaagcggataatgcactacggctttttcaaacagttaaactatctccgtattttacgccggaagaattttctcactatgttgctctattagggtttgaatgtgatgaaggtgtgaagcgcaatcagggaaggcccggtgccaatcaaggtcctgattatttgcggcaatcgttggcaaatatggctagtcataaagggcatgataaattggtagatttgggaagcattcgtgctaatcccaatcaattgagtgaagcacaacaagctttgtctgatgccgttacccaatgtcaatgtcagaatgtacgtaccttggtattgggtggtggacatgaaacggcttttgctcatggtgttggaatttatgatgcttttccacatcaacgtgttggtattattaactttgatgctcatctcgatttacgtcggtcgccgcagcccacttccggtacaccatttcgtcagcttgctgaatattgtcagcaacatcaacgtctgtttcactatacttgcattggcgcaagtttggcgtctaatacgcaggcattggtggatgaagcaaatcgcttgaacgccacgattatatgggataatcaatgtcgtgaaactatgctggacaaggtacaacagcagatacaagatatactccagcaagttgatttgatttacatgacgatcgatttggatgtattacctgcttatcagatgccggcagtctctgcgccagccgcattggggctgccattggagcgccttctgcaattaattcagccaatttgtcagagcggtaaactacaggcggctgatttggttgagctcaatccactatttgatatacaaggtataggtggaagagcagcagcacgtcttgcctggcaattagcacattggtggtattgattatctaaaataacagtactattgtgttttctattttggcaaagatagcttgatacagtgagtgtaattaatcacttaatatttttacagcataaggaatttattgtgacgactcactcatcaggatcatttgccaaacctgtgcctctgtatgccaaagtgaaacaatccatcattgaaaaaatctacactggtgaatggaaatcaaatgatcgtgttccttctgaagctgaattggttaaacagtttaactgtagccgtatgactgctaaccgtgcactgcgtgagttgaccgctgaagggctattagtacggctgcaaggcgtgggatcgtttgtcgctgaaccgaaggggcaatccgctctgtttgaaattcacagcattgctgatgagatttcagctcgttctcatcagcatcgctgtaaaatattaaaattatccgagctggatgcggatgtgaaacaggccgctgaattggacattattgttggtacgccgatttatcattcggttattgtccattatgaaaacgatgttcctgttcaaatagaagatcgttatgtcaatgctcaagcggtgcctgattatttgcaacaggattttacgaaacttacgccacacgattatttgtcaatgattgcacctctaacggaaggtgaacacattgtggaagcgattgctggtgatcctcgatcctgcaagttgttgcaaattgagtcaggggctccttgtttattaattagtcgccgaacttggtcgattcattacattgtttccagtgccagtctgttatttcccggtaatcggtataaattgaaagggcgtttcaactcatagctatattctcatcactgatttttttccgtatgagctaatagggttgccatagattattaccttcataatggattaatgcgatttcccgtattttatccgtcccatttatggcaaccgtattggtaagcgcattaaataaggggatgtcagagccagaatcaccataggcaacacatttttccaaatttagcccatgttcctgtacatattttttcactatctgtaatttactttcggaaattattattatctgtatttatcgtactataatcatagttttttgcggcgtaataatgattgtcatttaaattgatgcctatattgtataacaagctttttaattagggcaagatcgctaatgtttttttaatcacgaatatatccgtcatctttcaagttgcctctttgttggctgcactcgctcatcccggtcacatcgttatctatgctcccggggattcactcccttgccgtcgcgatgcatcttgaaatctttagggtataaagaatagatcaattaatttggaggaatagcgctaaaaacttttctcagtggtcaaattgagtgaaatacagacaatgtaactcctgacaaggtaatgccgtcatgatgactcgttctgttttgaaaaaagacaggtcagcgatcgaccaccatcgtcgaaaaatagatgaactagatgcgtgcgcaatacgggttatgactgtagtactaggaaaacctttccttccttaaatcatatttttgtaaaattaatgtaaataatttgtgattataaacacaaaaataagaaaaatatgattccttgataattggagagaaataatattaacaaattgattcataagaaaataaaaataataaactgatcaatttgtcattttggctaatggtttgatctattgaatatacatgtatatacaactatacatttagcaaatatctaaagatcaaaaggagccagaccgtgaccgcccaaaatagtaaattccgtagtgtcggtatccgggcacccagaggaacacaattaacagccaaaagttggctaaccgaagctcctctgcgcatgttaatgaataatcttgatccagaagttgctgaaaactcttatgaactggtggtgtatggtggtattggtcgggctgctagaaattgggagtgttatgacaagattattgaaacactgaaagagttggaagatgatgaaacgttgttaatccaatcgggtaagcctgttggggtatttaaaacccatagcaatgccccacgggtactcattgcaaattcgaatttggtgccgcactgggcgacttgggaacacttcaacgagctggatgctaaagggctggcgatgtacggccaaatgacggcgggtagctggatttacattggcagccaaggaattgttcaaggcacctatgaaacgtttgtggaagctggtcgccagcattataacggtaatttacagggccgttgggtgttaactgcgggtttaggcggtatggggggagcacaaccactggctgcaacactggctggagcgtgttcgctaaatattgagtgtcagcaaagcaggattgatttccgcctgcgtactggttatgtcgatgaacaagcgaaagatctggatgacgccctgactcggatcgaaaaatacactcaggaaggtaaagccatctctattgcactgtgcggcaatgccgctgaaattttgccagaattagttcgtcgtggcgtacgcccggatttggtcactgatcagacaagtgcacacgatcctctcaatggctatctaccgaaaaactggagttgggaagaataccgccaacgtgctatttcagcaccggaagaggtcatcaaagcagcaaaatcctcaatggtggaacatgttaaggcgatgctgattttccagcagcagggcattcctgtttttgattacggcaacaacattcgccaaatggcatatgaagttggcgtagaaaatgctttcgattttcctggttttgttcctacgtatattcgcccgttattttgccggggtatcgggcccttccgctgggtagcgctttccggtgatccacaggatatctataaaactgacgccaaagttaaagaattactccccgatgatcaacatttgcatcattggctagatatggcgagggagcgcatcagctttcaggggctacctgcccgtatctgttgggttggtttagggcaacgagccaagctagggttagcttttaacgaaatggtacgcagcggtgaactttcggcaccgattgttattggtcgtgaccatctggattccggctctgtagccagtccgaaccgcgaaaccgaatccatgtgtgatggctctgatgccgtttcggactggccgttgttaaacgccttacttaacaccgccagcggtgctacttgggtttctctgcatcatggcggtggtgtcggcatgggtttctcacaacatgccggtatggtgattgtttgtgatggaactgatgaagccgcagaacgtatagcacgggtgctgcataacgatccggctactggggttatgcgtcatgctgatgcaggttatgaaattgctatccattgtgctaaagagcaaggattagacttgccgatgcttaatacaaaataaggaacattatgaagcaactaactatttatccaggaaaattgacccttgatgaactacgtcaggtttatctacaaccagtaaaaatcactctggatagccagatttttcctgctattgaacgcagcgtagagtgtgttaatgcgattcttgctgaaaatcgcactgcctatgggattaataccgggttcgggctattagccagtacacggattgaagaagataatttagaaaaattacagcgctcgcttgtcgtctctcatgctgccggggtcggcaaagcgttggacgataatatgacccggttgatcatggtattgaaaattaacagtctctcccgtggttactcaggtattcgtctcgctgttattcaggcattaatcgcgttagttaatgcggaaatttatcctcatattccctgtaaaggatcggtgggggcttctggtgatttagcaccgttggcacatatgagcttgttattacttggggaaggacaagcgcgttatcagggcgaatggctgccagccaaagaagcgctggcaaaggccaatttacaacctattacattagcggctaaagaaggtttggcgttgctcaatggaactcaagtatccactgcttttgcgttacgtgggttatttgaggcagaagatctgttggcggcagcgatagtttgtggttctttatccgtagaggcggcattgggttcccgcaaaccatttgatgcccgtgtacatgtggtacgggggcaacaggggcagatcgatgttgccgcattgtatcgtcatgtattagaggagagcagcgagctatcagattctcacatcaattgccccaaggtacaggacccttattcattacgttgtcagccacaagtcatgggcgcttgcctgactcagttgcgccatgctgcggatgttattctgactgaagctaatgccgtatctgataacccattggtgtttgctgagcagggagaagtgatttccggtggtaacttccatgctgaacctgttgcaatggcgtctgataatttggctctggtattggcagagataggggcattgtcagaacgacgtattgcgttgttgatggattcacatatgtcacagcttccgccttttctggttgagaatggtggtgtgaattcaggttttatgattgcacaagtgacggcagcggcgcttgccagcgaaaataaagcattggcacacccggcgagtgttgacagtttaccaacttcggccaatcaggaagatcatgtatcaatggcaccggctgcgggacgtcgtttatgggagatggcagaaaatacccgaggtattctggcaattgaatggttatctgcctgccaggggatcgatttccgcaatggtctgaaaagcagcccgattttggaagaagcgcgtgttatcttgcgagcaaaagtagattattacgatcaggatcgtttttttgcacctgatattgatgctgctgtgaaattattagccgagcaacatctctcctcattacttccttctggacagatattacagcgtaagaataaccgttaaataaaccaatggccggcacctgaccggcctgattgtcacatttatctttctcataaaacccaataataaaagataagagggtaaatcatgcaagcttcattacaactagagcgaggactcaacgcacgccatatccggtttatggcgttgggctctgcgattggtacgggtcttttttatggttctgctgaagcaataaacatggccggtccggcggtattattagcttatttagtgggcggtgctgctgtctttatggtgatgcgtgctttaggggaaatggcagtccacagaccggatgccggctctttcgccagttatgctcatcaatatttaggcccgttacccggatttattactggctggacctatactttcgaaatgatcatcgtttgtctggcggatgtgactgcttttggcatttatatggggctatggtacccggaagtgccgcgttggatatgggtactgagcattattttcattattggcgcgctcaatctttgtaaagtcaaagtatttggcgaaatggaattctggttatcgattctgaaagttgctgcaatcagcgccatgattattgccggaaccggtattattctgtttggttttagcggtcattttcaggcaacgggagttcagaatctgtggcaacacggcgggtttatgccgaatgggctggggggcattattgagtctctggctgttgtgatgtttgcttttggtggcattgaaatcattggtattacatccagcgaagctaaaaatccggcgaaagtgatcccgcaagcgattaactctattccgtttcgcattcttctgttttatgtactcactatttttgtattaatggcgatttacccttggaatagtatcggccaagaaggtagcccatttgtcgcaatatttcaggggctaggcattggttcggcggcgaatattctgaatattgtcgtcattacggcggcaatttcggccattaacagcgatatctttggtgcgggtcgtatgatgtacggtatggccgagaaaggattagcccataaaaaatttatgcatttaagccgtaatggcgtgccttgggtgacgattatggttatgaccttggcgttattgtgtgctgtggttctcaattatttgctccctaaacaggtatttgtcattgttgcttcaattgcgacttttgccaccgtgtgggtctggttaatgattttgctatctcaatttgctatgcgcagaaaaatgtcaccgggagaagcacaaaaattacaattcccagtaccgatgtggcctgttgcgccgattttaaccatcgtgtttatgatatttattattgctgttctcagttacttccctgcgacacgaattgcattctatgtgggaggcgcatggatcgcgctgttaacatccgcctattatttatggatacgaaaaaatgtcattattgtgagcgctcaatcagccaaagaaacacggtgttaaataggtagaaaccaaaccgtcttgttgttgaataagacggtttgcaccgaaaattaattaaaaatctgcgataaaatatctggattgcctttttagttatcgttccttaattcattgctagctcaacattagtacttaaaattctatatcattaacctgatataaagctgatttgtttcaatgatcgtggcaaactagcaggctaatgaatttgcagggctggaggcgcttttggacaagatttttatcgatgaggcagtagctgagttatataccattcaggatatgttgcgctggtctgttagccggtttaatgcggcgaatatttattacgggcacggtacagacaatccttgggatgaggcactgcaactggttcttccatcgctgtttctgccgctggatatcccacaagagatgctgactacgcgactgacatccactgaacgtcatcgtattgttgaacgggtattgcgccgtattaatgagcgtattccagttgcttatttgactaatagagcttggttttgtggtcatgaattttatgttgatgagcgggttttggttccgcgttcaccgattggtgaattaattaataatgaatttgcaggattgatccctgagcagcctgccaatattctcgatctctgcacaggtagtggttgtattgccattgcttgtgcatatgctttcccggaagcagaaatagatgcagtggatatttccgcagatgtgctggctgtgactgaacagaatattcagaatcacagccttgaccaccgggtcattccgattcgctctgatctgttccgcgatatgccaccggttaaatacgatcttattgtcaccaatccgccttatgtcgatgccgaggatatgagcgacttgccggaagagtttcgccgtgagcctgagttaggtttggcggcgggttcagatggtttgaaattggcacgtcgtattctggcaactgcgccaaattttctcaccgaacggggtgtattgatttgtgaggttggtaacagtatggtgcatttgattgaacaatatcctgatgtgccatttacttggttggaatttgaatatggtggtgatggcgtatttatgttgacgcgccaacagcttattgaacatcacgagcattttcgcttattcaaagattgaataggttatagctgcggtaataacgcaaaacgggcagcgttaaataaaagaacggttaacaggaaggaattgggatggcgggaaatagtatcgggcaatttttccgggtcaccacttttggcgaatctcacggtttggcgttgggatgtattgtcgatggtgtgccaccgggcattgcaatcacagaagctgatttgcaagttgatttagataggcgtcgtccgggaacttcccgttatacaacgcagcgccgtgagccggatcaggttcgcattctttctggtgtatttgaaggggtaaccactggcaccagtatcggtttactcattgaaaatactgaccagcgttctcaggattacagcgctattaaagatgtatttcgtccaggccatgccgattacacttatgagcagaaatacggtatccgcgactatcgtggtggtggtcgctcttctgctcgtgaaacggcaatgcgtgttgcggcaggtgcaatagcgaaaaaatatttgctggataaatatggtattcgtgtccgtgcttgcttgacccaaatgggtaatatccattgccaattgaaagattgggaactggtggaacaaaacccatttttcagtcctgatgaaactaagcttgaacaacttgatgccctgatgcgtgaactgaaaaaggcgggcgattctattggtgcgaaagtgaccgtggtcgcggaaaatgttcctgctggtttgggagaaccggttttcgaccgccttgatgctgatattgctcatgcgctgatgagtattaacgcagtaaaaggtgttgaaattggtgatggtttcggtgttatcaatttacgcggcagcgaaaacagagatgaaataactgctcggggattcaccagtaatcatgcgggaggaattctggggggtattagcagtagccagccaattgttgctcatattgcgttgaagccaacttctagcattatggtgcccggcaaaacgattaaccgtcagggtgaagaagtggaaatggtcactcgtggtcgccatgatccctgtgttggtatccgtgctgtaccgattgcagaagctatgatggcgattgtgctgatggatcacctattacgccagcgggcgcagtgtgctgatgtcgaatccagccttcctcgctggtgaatttgagaatgaagctagccttgaaaatcccagagactgaaatgggtagcttaatgttgataagcggtttcttttgatgggatgaaatatggactggttattgtcattaggtgcggaagtttacgttctgctctttctggttgcagtaatggctgggtttattgactcgatttctggtggtggtggtctattgaccatccctgcgctgttatccgttggtgtctctccggtgcaagcgttggcgaccaacaagttgcaggcagtgggaggctctttctctgccagtctctattttgttcgttacggtgaggttgatatcaaatctcaacgttttgccatactgatgacattacttggctcaatggctggtgcgattattgtccagtttataaagccagattttctctgtcagctattaccggttctggtcattatcattggtctttatttccttttgacgccagccattggtatggaagatcgccatcgtcgcttgacgccggtggtcttcgccttgcttgttgggagtgggcttggtttatatgacggcatatttggccctggggttggctcattttatgcgttagcttatgttgtgttgtgcggctataacctggcgaaatccactgctcatgctaaagtactgaactttgcttctaatataggttcactggcgctttttatccttggcggtcaagttttgtgggtattgggccttgtgatgttggcagggcaggtgattggtgcgcggttgggcgcaagtttggttttgactcatgggcagaaattgattcgccctatgattgtcatcatctcctttttgatgagtattaagttactgaatgataatcacggcgatacgatccgtagctggctggcattttatttctgattcagggttttgtttttaattcatgataacgcataactatcaacaaattattgatatttttaatcgccgttttggtgacgaatacaacacgcatttggttaaaggtgataacgaacctatttacctgccggcagatgaagaggtcccctataaccggattgtgtttgctcatggtttctacgccagtgcattacatgaaattgctcattggtgcattgcgggtaaagaacgccgtaaactagtggattttggttactggtattgcccggatgggcgtgatgcacagaggcaaagtgaatttgaaaaagtagaaactaaaccacaagcacttgattggttgttttgtactgcggcaggttttccgtttaatgttagttgtgacaaccttgaaggggattttgaacctgacagattagcttttcagcgtaaagttcatgctcagatcatggattatttagcgcaggggatacctgcaagagcggagtgctttattcaggggttgcactcgttctacaatacgcccccattgaaagcggaatattttccttatccggaagatatattcgcagaatgaaactgaatttgaggaaaaatgatgctcgctgagtttgaaacgcgtattttagcgcaaattgatgacatggtagatcatgccagtgatgatgaattgtttgctggtggttatctccgcgggcatctcaccttagcagtagcagaattggagcaggaaggcgcacatacggctgaacagcttcatgaccgtgttgaagaaagtatccaaactgcaattaaagcgggagaattggcaccaccggatcaggttcttgtgcttaatacctggcagcgcctattggataatgctaaaactcaataattttattaagaggcagaaaacgaactgtactacccaaattcatatgaatatctgatagttggtggtgcagttccttatggcttttcaattttcaatttacgacctttcagtagttttttgatccaaaaacggtttgggtgaagggtcgccagtatttcattatccagtggtaatggctcatcaaagatctgcccggcaagaatttctgcactgagtggcgcagagcataatccacgagaacctaatgccccgataacaaatagattggaataacagggtgcatctgtaatggggctccctgtgcggattttttctggtaaatcttgataatctgtcattattttattgagatccggcacatttcccaccattggcatatgatcacggataacgcagcgaataccttgacgggattgtttagcagaaacatcaacctgatttacccattcggcatcagataaacatttcagcaaccggtcacggttttcctgttgttctgtttcagaatattcattatcaagccgatgacgctgataactggcgccgatacagtggtgttgattggctggattagccggtgtcatataaccatcgtagcaaagcacattttgcaattggctcaagtcagttgtggttggaatgtgactgacttgaccacgcacagcagttactggcagtttctcggtttgttcaaactggggtagatgatgaccgttggcaatcaccaccgttttgtgttgtgcatttaacgattgtccttgatgcatgagatgcaattgccagccatgttggttgtggctaagcgcagtaacttgatgattgaagcaacagagcatgccttgctgttgtgccaactctgttgctgctttagtgagttctgccgggcatagccatccgccctgtggatagtgaatgccgtggtgatgaatatccagcccacatttttcactcaactggtgacaattcatgccgatggcgagttcattcggccattctgttgccagcattttctcaattttcttgctacttttttcatcataagcaagctggctgacaccacaccattgatggtcgaaatcaattccctgcgctgagaactgctcatattggcggcgggcaaaggtaaatgcagaggtaaagaatttttcgagtccgttattactaccgttcagtagcgggtaaagtgctccttggcgattaccagacgcaccttgtgccggagctacatcctgacaataaagcgtcacctgtgctccacgacgcaatagcgcgagtgcggtaagaataccggcaatcccgccgccgatgatagcgatatcatcgttgtggcttgctgacggacgggcaaaccaaggtgctggtaatggttgatacttctgagttgccagaactccggccagcatttctcttttacggccaaatcctttgattttactgacattaaaaccagcctgttgtaaaccacgacggacgatacccgcagaagtaaaggttgcaaaagtgccttctggatgagcaaattgcgccattgcagtaaacaactgttcactccacatttgtgggtttttggcaggtgcaaagccgtctaaaaaccaggcatctattttgccgtgaagacttgaatccattgttggcaatagatcattgacgtcaccaaaccataaatccaatgtgacagcgccatttgccataatcaaccggtggcagcctgccagtggttgaggccattgctggtaaagttgctgtgaaaaaatctcaagctcaggccagcgttgatgcgcggcttttaagtcgttggttttcagtggatacttttcaaaactgatgaaatgtagacgtttcaatggcgcatcaggattttgctgtcgaaatgcatcaaatgcttgccagagcgtcagaaaatttaatcctgttccgaaaccggtttctgcgattacacaactagaacgggaatgggtgcagaatcgttgggggaagcagttaccgttgagaaatacataacgggtttcttccagtccatcctgatttgagaagtaaacgtcatcaaactgtgttgaaatcggagtaccttgatcattccaacttaaggttgcggtacaaatagcagaatttttcacggtaatgcctgtaatattgctgataataatgcgattttagcgaggttggggttgatgtaccacctgacagaagaaaagggtggaaaagtgttgagccttgcttgcggtgtgtacggttattggaagaagcaggggtcattattaccatcatttttgtgtgaataatggctttatcagttgataaagttggaaaattttttgttctaaaacatttgttgctataatcttgagtattttccgtaattcagtcagtaatataacatagggattgattcatttcataaaaattttattcatccttattattcttagttattaaatttgtttctaattagcaagaaatttaataaaaatggcaagtatagcaacctctatataaatataagtctactaatcattattcggatgcttgacaagttcatgtgtattgcattgatattattatccttaacataaatttttgatggaaattaagagtgtttttttgatcttattgtttaccaacataattcctatctgaaatttatttttatctattaaaatctgaattttttttactgtattctatgagagttaacagtcattttgacgtgaaaacatattgggatttttagagagatgaatttttattcgtaattttatcctgatcggacttgttcagcgtacaagtgtacgctaaagtgctacatagctatagatagaaatcccgcagataaacacatttaatgaggtatttaatgaagcgcgtagtgatcactggcttgggtattgtctccagcattggtaataatcagaaagaagtactggcatctctgaaagaaggccgctccgggataactttttctgaaaaattcaaagagataggaatgagaagccatgtctggggtaatgtaaagctggatacctccggattaatagaccgaaaaattcagcgcttcatgagcgatgcctctgtttatgcttatctggcgatggaagaggcaattaaagattctggcctggctgatgatcaggtttctaatattcgtagcggattggtagtgggttctgggggtggttccccgcataaccaggttgcgggtgctgatgggatgcgtactcgtggtttgcgtggtgtggggccttatatggtaacccgctcaatggcttccggtgtgtcagcttgccttgcaactccctttaaaatcaaaggggtaaactactctatcagttctgcatgttctacttctgcccattgcataggtcatgcggctgaacttattcagttaggaaaacaggatattgtttttgctggtggtggtgaagaactctgctgggaaatgagttgtgaatttgatgcaatgggtgcactttcaacgaaatacaacgaaatgccagaaaaggcgtcccgtacttacgataagagccgtgatggttttgttattgctggtggcggcggtattgttgttgtggaagaattagagcatgcattggcacgcggcgcacacatatacgctgaaattgttggttatggagcaacctctgatggcgcagatatggttgttccatctggcgaaggtgcggttcgttgtatgaatatggcactgcaagatgtgaaaggttccattgattatgtgaacacgcatggtacatctactcctgcgggtgatgtgaaagagttggaggcgatcagggaagtctttggtgatacaacaccggcaatttctgcaacaaaagcgatgaccggccattcactgggtgctgctggtgtacacgaagcaatttatagcctactgatgttagagcatggttttattgcaccaagtattaacattgaagctcttgatgataaagcggtaggcatgaatatcatcactaaacctactgagcaaaaattgaataccgtgatgtccaatagttttggtttcggtggtactaatgcttctttggtgatgagcaagtattcagcttaatttccctcatcacagactgtttcgatcgtgtccaaacaacaatggtcgttatttgatttatcttaggtgactgcgtacagcgagtcacctttgtatgtatacccgttatctttcaagttgcctctttgttggctgcactcggtcaccccggtcacatcgttacctatgctcccggggattctctcccttgccgtcgcgatccatcttgaaatccatagggtataaattcaaacctgttttgctgaattttgattttgtgtgaaatataatgtgaatacggaagtatattcctgttacggtagaaaagcccataatatttttatacccgtcatctttcaagttacctctttgttggctgcactcactcaccccggtcacatagttatctatgctcccggggattcgctcccttgccgccgcgatgcatcttgaaatccatagggtatataataatgatgatcttgtaatattataggcttttatttgttacgttttattttcagtagccatttgctgaatacggcgcttacggataattcgtaatattggtggaataatcagaaccagagctgctagtatcaataaactctgagtaattgtgctgctccacagaatgccaaattctccattactaatagaaagtgcgcgacgtaaattttgttccagcatttctcccaatacgaaaccgaggattaatggcgacatcgggaaattcatctttctcagaatgtagccaaaaatacccaatcctaccatcaacagaagatcaaatgtcgtactgtgtatggcatatacaccaaccgctgaaacagtagcaatcgctggaacaaggaaccagagtgggatagtgagcatccgtgtaaatagacctatcattgggatattcataatcagtaggataatattggcaatcaataaagccgcaattaacccccagacgatatccggttgttcagtgaacattcccggcccaggcgtaatattatagagcgttaatgcccccatcataacggcagtggtacctgaacctggcacgcctaatgttagcattggaataaaggagccacaggccgaagcattattagccgcttctggtgctgctacgccgcgaatatcacctttaccaaatgaatcgctattcccactgagcttcttctcagtcatgtaggtaattgcgctggcaatagtcgctcctgcaccaggcaaaataccgacaaagaaaccgataaaggatgatctaagcgttggcatagcgcattcagccgcttccttgcgattgaacagcagacggcctgttttgcggataatggttttgccggccgaggtactctctaacatcagcaaaatttcgctgacagaaaacagacctattaccacaacaataaattgaatgccatctgacagatgaacgttgtcgaaagtaaaacgataaaccccggtgttggcgtctactccgacagttgccagacccaatcctattaatgctgctaatagtgatttcagcggattctggctcatcatgctacccagacaagcaatagcaaaaaccataagtgcaaaatattcagcagggccgaaagccagtgaccactgcgccagtaatggtgcaaacaaaataatgccgaaaattgccagcaaagaaccacagaaagaacttaccgcggaaatagatagcgccacacctgcacggccctgtttggccatcggataaccatctaatgcggtcataatggcagcggcatcaccgggaacattcagcagaatcgatgatatacgcccaccatactcacaaccgatataaacagttgccaataagatcagggcagattcagcaggcagttttaaagcgaaagccagtggcagcagaatcgcgacaccattaattggcccaagccccggtaacagcccaacaatcgtaccgacaaaacagccaattaaagcaataatcaggttttgcggcaccattgcaacctcaaacccttgactgagatacatccaggtttccataaattctccgtcagttgagccagctaccgagaggcagggttacgtcaagtaagcggtcaaaggcgaaatataatgtgacgccaaggaacaccccggaaatgattgcggcaggcagtgttgcgttaaacaacagcgcgacactgaatgtcagcagcgctgtagccagaggaaaaccaagccactcgaatgaccaaccataaataaccaaagagagaatcaacagcattaggcgacggataacgggggcactaggccaattgctctgctctggttttttgaaaagtagtagtaaagcacagagtgccatcagagacagaatgatcattgggaaaggtctgggccccagaggttcataagtgtattcgctctgaattccccaaccaataactatcccaatggcacagagtactaaccagatagtagcaaagatacgatcgttcatgatgatgactctgttatttggctaaaccaaaagctctggcttgttcacgatattgttcaacctgttttttcacatagctgtccaactctttgccggtcatgttgaattcaaataacccacggatatcacgttgttttttaaaagcatctgtttgttgtagtttattaaaagcatcaacccaccattgatactcttcgtcagaaacttttggtcccatgtaaaatccacggataattggccatatcaggtcataaccttgctctttggcagtaggaatattggctaaatcaccatccagtcgtttatctgcataaacagccagaacccggattttgtctccattcagataaggtaccatctcgctcagatcaccggaaaccgcctgaatatgattacccagcagggcggtgataggttcacctcctccctcaaaagcgacataacgcattttgtgaggatcaattccaacctcttttgccagcagtgcggttttcatccagtcctgactaccgatagaagcgccggcaccaaatacaatgctgctgggattatccttaaaagcattcatcaaatcgttcagggtacggtaaggtgaatcggcacggacagcgatcattccataatcagtaccaacacttgccagccagcgaacatcgttaacgttatagcgaccaaattttccctgagacaaattgagtagagagccgccagaaaaggcgacaatggttcctgcttcagtaggtcgctgtgcgacgatagcattgtaagcgacagcaccaacaccaccgggcataaaagtgacacgcataggcttgctgatctctttcgtatccagtagtgaaacttggaccagcttgcaggtcaggtcgaacccgccacccggttttgcaggggcaatacattcggtccggttaggtgcactggcagcaaaaacactacttgtgccaaatagtaaagcggttgccgctaacatcttgatcgttatagttttcatttgtttgctctcatcaatacccttgtaagatataatcactacaaacagacctggttggcttaattagtaataacaaaacctttcatttacctttcagtaacaagaaaagttgttgatatgtgatttcaatcgcttaaatttgcgtagcgtttcgcattaatgagtttacaaatggctacaggcttccttttttgttttggtttgttgtaagtttctcgtagttttgatgttgttctgttttactcgcggtaactttacattcgactaaggaggtattatgcaaatggtaattatttatttatgcaatgtgtcaaattaaatggaaaatttattgaatataatcagactttatcttgaggaagtctgaattgaggaaatgatgagaaaattgattctttgcagtgctatgggtagtgctatggcttttactttggcgggatgtaaaacagaactcagtacttcggtatctgttaaccaactgttatctgaacaagttaaaacggtgacatctgatttgttagttgaagtcagtgcctgtggtgattataaagattccagacaatcatcaaaatcattgttagacactcaagaaaaagtaccggctatttttgccaatgcggaatacgtggaatgttttagaaaaagtatggattcgtttgctcactttaaagttcctgtgagtgtagggaattcaagtataactggttctactaagggcattcatctttatggtaatggcgcagatatcttggtgataagcgtaccaaaagcgataaaggagaaaattaaccagatagatagttcaatggcatcaaagaccaaaatttcaattaatattaagaatgatactggtgaagttttaaaaatgacgggtttatccgcattccttaatgataaagagccgatggtgatatcgaattttagtttaaaagtaggtagtgaaataaaactcactttgtctaatgtctctgtggcgtctgcattggatgaacgttttgattttactcctgtgctcatggcaatatctgagtaaatggaagcggtaatagagatctattacttaatttggtatggcaaaataccctgttatttatagcgaagtattttggcatgaaaatggaattaagttgaattgagttagtgtctgactatttttcagaaaaataggtgtggcgatataccctatggatttcaagatgcatcgcgacggcaagggagcgaatccccgagagcatggataactatgtgaccggggtgagcgagtgcagccaacaaagaggcaatttgaaagataacgggtataaactggaaatatagttatatctgtaattatatttatacccaatggatttcaagatggatcgcgacggcaagggagcgaatccccgggagcatagataacgatgtgaccgggggtgagtgcagccaacaaagaggcaacttgaaagataacgggtatatattaatcgattagatattgaaaatatgcgtttacttttagtggaagaccaccctgaattattgcattggctgcaaaaagcactgagtagttcaggatttgccgtagatgttgctagtgatggtatagttgctgatcaattattacagacagaaaactatgcattattgattctggatgtttctttgcctaggttggatgggctttctctattagttcgtttgcgtaagcgtgggcaaaatttgccggtattattattaacggcgaaaactgatgtttctgagcgagtgaaagggcttaattctggtgccgatgattatctgacgaaaccttttgatttacaggaattggaagcacgtatccgggcattacttcgtcgtagtgcaggtgttctacaggagacgctgacattcggctcccttgtttatcaggatgatggttactttgttctgaacgatgagccattggctttgacaccaagggaactttcggttttgacaacattgttccatcgtcgggggaggcctgtttctaaacaacagctctttgaacaggtatttgcactgtcagatgaagcgaatccacaaagtattgaactttatgtgcaccggattcggaaaaaattatcaggcagtaatgtggggatcagtacattacggggattaggctatcgtctggagcgtcagaaagatgacatggtttaaagtaccgaactcattgtttcatcagttactcttgttttttggtgtcccattgtttgtgttgggttgtttatcggttggcacccattattttagtgcagagaatgcggcgacattggcttatgaccgtactttattggcatctgctcgaactgtggcagaacggctgactgttaaaaataaccaattaattgtcgatgtaccttatgtggttctggatagttttgagcgaaatatgaatgataggctgttttatcaggtgttatcacccgaaggggaaataatttccggttatgatgatttgcctttgatccctaaagatacgcttcgctccaatttatacacggctctagtttatttttatgatgctgaatatcacggccggcccattcgggttgctgccctttatcagccgatcaatgaagggggaatgatgggaatggcgttgatactagttgctgaaacagtggcttcccgtcattatcttgcgcaacaattattaatatcttctttgatgagccaaggaaccgtggttgggttgactctgattctggcttattttctgttgaagcagttacttaaaccgctacataaactttctggcgtcatggtccgtcgtcccgcaaatgatcttactccgttaccggatatgttgccttggtcggaactttccccattgttatatgcatttaatcgttatatagagcgactgaaattgatggtgagtcggcaggagaggttcagtgcggatgcttctcaccaacttagaacgccattaacagtattaaaaacgcaagtagcggtagcgcttgccagcaaagatccagcgcaatggaaagaaagcttacaggccattgatagtacattggataacactatctctctgacggatcgtttattacaactttctcgtttgaaagcgcatgaaaaggaggccgttcgggattataggccggttaatctagtcgaattgttgcaacaggcatgtttttctcgtttgcaacaggctgaaagtaagaatattgatttgggttatgaaggcgaaaatgctcaatggatcaagggggaacctgtattactgacggaaatgtgtgctaatttattggacaatgcaattaaatatacaccggaaggtggcattgttacggctagagtgattctcaactcttgtaagacatattgttatttggaagtggatgacagtgggccggggattgctaaagaagacgtcaatttgtctctgatggcttttaatcgtcttgataatgctgcggggcatgaaggggcaggattaggattagctctggtaaaagatatcggtatttatcatggtactcatccccaattattgcccagtgaaacactgggcggtttattagtaagaatcccttttaggctttctgatgattaatttcctgaggtttttctaataagaggggtacgtagttgctgtgccagtataacgcctaataacgttatactgccaccaatcaggtggtaactgtgcatctcttcatgcagaaccagaatagcgataatagctgtaaatatcggcgtcaaattcataaatatggtggtggtattcgcaccaagttttatgacgccttgtatccataaatagggggcaatgatcgaagctggaataccggcgaataagactaacgagatattgctggcattcaattgaacatctttggtcaataggaaatttggcagtaataacaggacaccaaaagtgatttgtacatatagggattgccagttgggtaatggaatagaccaatgtttggttaatacgccatagagtgcgtaggagatggaagcaagcaacatcatcaattcgccgcggcctaaaccgtgttgcaataatgatatgggatcaccggcgctgaccaaccagattaaaccagacagagatagaacggtaccaagagcaaggccgacagtggggacaacacgtaaaacaaatatactgatgatcacagtcaaaagaggaatcaatgagctaagaattcccataaatgttgcactgatactgtgcgcagcgtaataggccaagctttgataaagtaccatgccaagtgcgccaagaattaataatttccaccaatattgacagattgttttccatcgccgaatgaccgagagtacaacaaagggggttaatgtgagaaaggctaggaaccagcgataaaaagaaattgccgccggatcaatagctgtagcggaggctttacttactacggcattaattgaccaaatcaggactgctagaaacgggaaaattatattcatatagatagtcgcattgagataaaaatgagtgtgtttagtctaatagtgtctgatttattatatacatatcctatggatttatgtttggttaatacgccaaagagtgcgtaggagatggaagcaagtaacatcatcaattcgccgtggcctaatacgacagccgtacttatttctcttaacagaaaagacactcatagaaaagcttaattcatgcggtttctcagaattgtgagcatcaaagaaaatgcaactttctggtatctacggctgtagtactaaaccgtgttgcaataatgatatgggatcaccggcgctgatcaatcagattaaaccagacagagatagaacggttccaagagcaaggccaacagtggggacaacacgtaagacaaatatactgatgatcacagtcaaaagaggaatcaacgagctaagagttctcatgtgaaaaatttcatttgaaaacagtatgttaaatataaacacatataaaacataaaaataaattataataaatgaaattcttattataataaaagagtcctttgaaatatcgtttttttgccaacataactaactttttatatttaaggagttaaatatgccagcagctcaagcttatgctccacccggtttttggggccttggattgatttacaaggatggtttggtagtaacagccacggtgttataccctatggatttcaagatgcttcgcggcggcaagggagtgaatccccgggagcataggtaacgatgtgaccggggtgagcgagtgcagccaacaaagaggcaacttgaaggataacgggtatagatatactttcgatacagaatcacaggctccatccacttttttcgttgaaatacaatatgtagatgaaccaacactaaaaacgatacaaactataggccctggtgattatctggtccgtagtaacggcggaataggaacagatagaatcaggtgtagaagtcattctataggacaaaacattagaattacttggtaatttattttaatatactgttaattgcagccctacccgaactttaagtagggctatattctgtaaaatcgttcagtatagtaggatcaaaattatgagaaatttattggttattatgttacttatatctgccataacagggtgttctagtaatccagataaacaagtacaaagagaagatggattgaaatttacattctcatccggtgataaatttatcttaacccgagcctgtacagatcaaatcgattatataggggtagatgaaggcggtaataaccaattagcaatagtggtaaaaaaaataaaccctgttttccctaccttgatacattaatcaataaaaatatcggctcccaagtgacaatatcattcaaaggtatacctattatattgaataccatccaaactgctttaggcccttcattcagaatggcggtaaaagatacacaacaagccatgaatatcgttgatatattgaaaaactaaatagtaatcagttccttgctaaaaaatcaattataccctatggatttcaagatgcatcgcgacggtaaggaaacgaatccctgggagcatagataactatgtgatcgggggggcgtgaatacagccaacttttttgatgtgggttatagctcatcttctgcttttatcgctatgtttcagcaattggcaggcacgacaccggaacgtttcaggaaaagttaacaacaaaaaaaccgttattatgggttttgttataattaaatggcagaatagctcgctacgtcagttttaatgccacaggatggaattaagtgaagattctggttgatgaaaatatgccttatgctgatcaactatttcagcaattgggggatgtacaagctattccggggcgtccggtaccggaaggtgtactggatcatgctgatgcatttatggtccgctcagtgactaaagttaatgaagaattactgaaaggccgcgcggtaaaatttatcggtacggcaacggcagggactgaccatgtggatcagtcatggttatcacaggcaggaattgggttttcagcagcgccgggatgtaatgccattgctgtggttgaatatgttttctcagcgttaatgttgctggcggaacgtgataattttgagcttaaggataaagttgtcggaatcgttggtgtcggtaatgtcggaagtagactggctgaacggttagccgtccttggtatccggacacttttatgtgatcctccaagagctgacagaggggacgctggtgaattttggtcactggaaaaattggttaaagaggcggatattctgacattccatacgccactcaataaatcaggtccgtataaaacacatcatctggtggatgtggaattattgtcggttttgccggataaccgcatattgattaacgccagtcgcggtgaagttattgataatcaagcgctgcttactgcattgaaatgtggcaagaaactccgtgttgttctggatgtatgggagccggaacctgatttatccctaccattactggaattagttgatattggtacaccgcatatcgcgggttataccctcgaaggtaaagcgcgtggtaccacacaggtatttgaagcttactgtgaattccttggtcaaccccgtaaagtggctttatctgatttattgccagaaccagatttcagccgggttaccctacatgggaatgtcactcaaagcacactgaagcggttgatgcatttagtgtatgatgtacgccgcgatgataccccgttacggcaagttgccggtcaaaaagggcaatttgattatctgcgtaaaaactatttagaacgccgggaatggtcatccctaactgtatgttgtgataatagagagagtgctgagttgctagctgctcttggtttcagtacagaactgatttaatccgtgcagaaatatatctacatgtcagaaagatagatggagaaaaccaacatgtcagaaggttggaatattgccctattgggtgcgacaggggcagtaggtgaagcgatattggcgttattacaagagcgtcagtttcccgttggtgaattgtatcctctcgccagtgagcgtagtgccggtgaaagcttgcgttttaatggcaaaaattttgttgttggtgatgctgctgattttgactggtcacaggtacagctcgctttttttgtggctggattagaggctacggcacaatatgttgaaaaagcgacagaagaaggttgtttggttatcgatagcagtgggttgtttgctatggagcctgatgtacctttagttgttccaggggtgaatcctcatgttttggcggattatcgtaaccgaaatattattgccttagcagatagtatgaccagtcaggtactgacagccattaaaccgctggtggatgcggctggaattgcacgtttgcatttgactaatctgttttctgtttctgttcacggcaaagcggccgttgatgaattagctggacagagcgcccgtttgcttaatggcattccaccggagccaggtcatttcagtaaacaactggcatttaatcttttgccgttgccaacagaagctgaaggttctgtgcgtgaagagcgtctccttgtggatcagatacgcaaaattttacaggatgagggattacccatttcagtgagttgcgttcagtcttccgttttttatggcaatgctcaagtagtccatttggaaacattgcgtccggttggggtggaagaagttcgagaagaattagagcggatggttgatattaacgttgcagatgaaggcgattatccaactccagtgacggaagcatcgggtaatgatgtgctgagtattggttgtttgcgccatgattatggtatgccggaaatattacaattctggtctgtggccgataacatccggtttggtggtgcattaatggctgttgagacagcggaaaaactgattcaggagcaattttactgatgttcggtacagaacaaacagaatctgtgccaggttcaaagatgaaaattgcattgggaattgagtacgatggcagccgatattatggctggcagcgtcagcaggaagtaaaaagtgttcagggatgccttgaggaagcactatcaaaagtcgccgatgaacccatatcggtattttgtgctggtcggaccgatgctggagtacatgcaacagggcaggttgtgcattttgaaacgtctgttcagcgcaaggatgcggcgtggacaatgggcgtgaacgtacatttaccgccagatattgctgttcgttgggtgaaaaccgtggatgagggtttccatgcccgttttagtgcaactgctcggcgatatcgttacattatttttaatcatcgttatcgtccagcagtgctggccaatggtgtgacccattttcactatccactggatgaaaagcggatgcatcaggctgcgcaatgtatattaggagaaaatgattttacctctttccgtgcagttcaatgccaatctaaaacgccttggcgtaatgtgatgcatattaatgtcaatcgttacggacattacgttgtcatagatattaaagccaatgcttttgtgcatcatatggtgcgtaatattgcgggtagtctgatggaaattggctgtgggaatcaggatattaactggatggcccagttgcttgctttaaaagatcgggcgaaagccgctgcgacggcaaaagccgcagggttgtatctggttgctgttgattatccggtgcaatttgatttgccttgcgctgttatgggacctctgtttttggcagatgatctgatttaacatttctagttgccgacacggatgttttggcatagtggggaatattatggaatttctgactcattttgttgattttgctaaatttattattgatttcattctccatattgacattcatttagccgaactggtcgcacaatatggtgattgggtatatggcattttgtttctgattttattttgtgaaacagggttagtgattactccgtttctaccgggagattcgctgttatttgttgccggcgctttagcggctctgggctcaaatgatctgaatgtgcatatcatggtggcattgatgattattgcggctattattggtgatgcagtgaactatgctattggtcgcatctttggcgaaaggttatttactaatccaaattcaaaaattttccgccgcagttatttagataaaacacatgagttttatgaaaaacatggtgggaaggcaattattttggcgcgatttgtaccaattatcagaacatttgcaccattcgttgcaggtatggggaaaatgtcttatcgtcgttttgctgcttataacgtgattggcgcactagtatgggtactgttattcacctattctggttatatattcggtgatatgccaatggtacaacagaatttgaaactgttgattgtcgctatcatctttatttcaatcctgcccggagtgattgaaatctggcgtcatcgtcgtacggtgatgaagcagaagagtgataaccggtaacaggtttgagcagttttttatccacactgtaatagcattgtggtttaatggcacacaataacaaaactggcataagccagattcagacggaaagatcattcaatgagctggattgaaaaaattcttaataaaagcaacattacccaaacgcgtaaagcgaatatcccagaaggggtttggactaaatgtgatagttgcagtcaggtgctctaccgtgctgagctagagcgcaatcttgaggtttgccctaaatgtgatcatcacatgcgtatttcggcgcgtacccgattggctacattccttgatgaaggagcaacgacggaattagggggggaattagagccaaaagatattcttaaattccgcgattccaaaaagtataaagatcgtatatcagcggcgcagaagcaaacccaagaaaaagatgcgttagtcgtgatgaaaggtaccctgagtggtatgtcagttgttgctgctgcttttgaatttgcatttatgggcggttctatggcttcggttgttggtgcccgttttgtccgtgccgtagaacaggcgttggcagacaattgtcctctgatttgtttttcttccagtggtggcgctcgtatgcaagaagcattgatgtcactgatgcagatggcgaaaaccagtgctgctttagcaaaaatgcaggaacgtggtttgccttatatctctatcatgaccgatccgacaatgggcggtgtttcagcaagtctggcgatgttgggtgatatcaatattgctgaaccaaaagcattgattggttttgccgggccacgagtgattgagcagactgttcgtgaaaaattaccgtccggtttccagcgtagtgagtttttgctggcaaagggagcgattgacatgattgttcgtcgtcctgaaatgcgtgacacacttgcaagtttactttctaaactaactcatcagtcgcagccaggtactaagccaattgttgctgaatttgtggcagaacccgctgatgttgaggcggatattcaaataagtaccaataaagaagatgcctgacactttacaaattcctcaagccacgtcgccattgatgacgtggctttcctaccttgggaacctgcatactacggccattgatatggggcttgagcgtgtggggaaacttgcccgaactttggcgttggttaatcctgcacctaaggtgataaccgtatccggtactaatggtaaaggtactacctgttgcacgatagaatctattctgttggcggctgggctgagagtgggtgtttacagctctccgcatcttgtacgttataccgaaagagttcgtattcagggtaaagagttacctgaacaggaattctgtcgtgtatttgcggatattgaatctcgtcgcggtgatatttcgctgacttattttgaatatggcacattagcggctttgcaactgtttaaacaagcttgtttggatgtggtcatcttagaagtaggcttaggtgggcgactggatgcgacaaatattgtggatgccgatattgccgcgattaccagtattgcaattgatcatattgattggttgggtgccgatcgcgaacatattggtcgtgagaaagcagggattttccgtaaagatcgctttgccgtggtcggtgagccggatatgccatcttctattgcggaagttgcgggtgaattaggagccaagttgttccgttgtggcattgactggcgtttctctcaacagaataaaaactggcactggcaatctgatgataggctatttagcaacttacctttgccaaatgttcctctgatgaatgccgcaacggcgatgggtgttatttgttgcctgttacgacaagatgataaagtcagtcgagctattaatgagagtgcaatccatcaagggctacagaatgcgcagttgcctgggcgtttccagatagttcgtgaaaagccattgttgatcttggatgtggctcataatccccatgcggcggcttatctggtacagaaattggcccagttgccccgtcagccgggcagtagaatccttggtgtagtgggtatgctaggtgataaagatattgccggtacactgacttgcctgtcacagcaaataaatgagtggtattgcgctccgttgactgaacagcgtggtgcagatgcacagacactggctcagcatcttggacagccacggatatttactgatgtggaaagtgcttggcatcaggcgatggttgatgctgatgagcaagatattgttgtcgtttgtggctcattccacacggtagtgcatgtcatggaggctctggacagggagaaaggaagtggcaagtaaatttcagaatcgtttggttggtacaattgtattggtagcattgggtgtcattgtgctgcctgcgttgctagacggcaataagaaatataacgaagataaatttgcatcaattcccttggttccaaagccaggggatgagcaagaaattgactctatatctcctctaaatccaccaatattatcagtgcctctggaagatgaaacagaggcattgcagccagaaacactggagcagccggaaataccattggttaccactcctcagcttgcgccgatagtccctcctgctgttcagccagaagtgaagcctcaaccacagattaagcttgaaccaaaaccagatactaagccgtcggcaccggcgcttaagtctaaaccagacattaagtcagagtcgaaacctgaagttaaaccgattgaaacagccccgcaagggcaggcttatatcgtacaactgggtgctttgaaaaatgccggaaaggtagatgaaatcgttgccagactgcgtttgtctggttatcaggtttatacggttccttcatctccggttcaggggcaattaacgaggatatatgtcggtccaaatgcgtctaagcaacaacttgactcggcattatcagaattgaaaagtttgactggattacaagggcaggtaaggagttacaggccgtaataaaagtgggtaatgcctatgtgacaaatctatgtgacaaataggacaactatcatgaagaagtaaatattaagtgactgcggcgatgataattattcaaattcgtcgtcttaattattttcagtgggataggaaatctgctacgcaaacgttttcgttttctgttagaatgcacctgaaacggatgccgaggtgtctattttggaattaaaacatggtttggattgattacgctattatcgccattattggcttctcggcattagttagcctgattcgtgggtttattcgtgaggcattatcactggtcacctgggggtgtgctttctttgtagcaagccatttctatacttacttagcggtctatttcacccgttttgaagatgaattggtgcgtaacgggatcgctattgcgttgctgtttattgctacgttgattgtcggttctatggtgaactatgtgataggttctcttgtgcaacggactggattgtcaggtactgatcgagtactgggggtctgctttggggcattgcgtggtgtgctgattgtcgctgctattctgttttttctggatacatttacaccattggctcgaagtgaggattggaaacagtcacaattgatcccgcaattcagtcatatcataaggtggttctttgactacctgcaaaatgcgtcaagtttcttgccggagaaatatacctctccgtttggctgatgaggaagaactacatgtgcggtattgttggtatcgtcggttttacaccggttaaccagtcgatttatgatgcgttgacggtgcttcagcaccgtgggcaagatgctgcgggcattgctactattgatggtaacaatggatttcgtttacgcaaagccaatggcttagtgagagacgtgtttgaagcccggcatatgctgcgtttacagggaacgattgggattggtcatgttcgctatccgacagcgggcagttccagtgcatcggaagctcaaccgttttatgtgaactctccatttggtattacattgacacacaatggtaatttgacgaatgctcatgagttgaagaaaaagttgtttgagaatgcccgtcgccatgtgaatactacgtcagattctgagattttgctcaacgtttttgccagtgaactggattgctcccagcattatccattggtgcctgacaatatttttgcggcagtagcggcaatgcataaacaggtgagtggtgcttatgcctgcattgcgatgattattggtcatgggttagttgctttccgtgatccgcatggtattcgtccgttggttttaggtaagcgcactttggatgatggccgtaatgagtatatggtcgcttctgaaagcgttgcattagatacgctaggctttgaattcctgcgggatgttgcatcaggtgaagcgatttatattactgaacaaggtcagttatttactcgtcaatgtgctgaaaatccttctctgactccctgtttatttgaatttgtctatttggctcgcccagattcctttattgataaaatttcggtttataacgcccgcatacggatggggcataagctaggggcgaaaattgcccgcgaatgggaagacttacatattgatgtggttattccaatccccgaaacatcttgcgatgttgcgttagaaattgcgcgcatactcggtaaaccctatcgtcagggatttgtgaaaaaccgttatgttggccggacatttatcatgcctgggcaacaggaacgccggaaatcagtccgccgtaaattgaatgctaatcgcgcagaattccgtgataaaaatgtgctattggtggatgattctattgtgcgtggtacaacgtcagaacagattgtcgatatggctcgtgaagccggcgcgaagagagtttatcttgcttcggcagcaccggaagtacgtttcccgaatgtttatggcattgatatgcccaatgcaaatgaactgattgctcatgggcgtgaagtggatgaaattcgccaacttattggtgcagatgcattgatatttcaggatttaactgatctgatcgacgctgttcgtgaagaaaacccggatgttgacgggtttgagagttcagtattcaatggtgtttatgttaccaaagacgttgaccagacttatctctattatctggagaatctgcgtaaagacgatgaagtaaaactgaataatcagaatgaagttgaaaatctggatatctataatgaaggttgatgactttcgggtttagcgagttgttcagtgtttgtatgaggaaaaaatgaaaagattgatcgtagggcttacaggagcaagtggggccatttatggtataaggctactgcaagttttacagccagttgaagggatagaaacacatctggttatcagtcattccgctcgccagacactggcacttgaaacagattatagtttacgggatgtgcaggcgctggctgatgttgtgtatgacaacagagatatcgctgctgccatctcttcaggttcattcaaaacttcgggcatggtaattctaccatgctcaatgaaaaccctatcaggtattgtccatagttatactgatggattagtgaccagagcggcagatgttgtattgaaagaaagtcgtaagttagtgcttggggtaagggaaacgccgttgcatttggggcatctcaggctgatgactcaagcggcagaaattggcgcggtgattatgccgcctgtgcctgcattttatcatcagcctcaacagattcaggatattattgaccagacagttaaccgcgtgcttgatcagtttgatattgagctacctcatgatctatttacccgctggcaaggggctaaaagcgttgagatttagcatccagtaagtcttgaaatgcctcttttagctgaaaataacggaagccaaaacccgcttgttccaagttatgcggtatggcctgttgtccgcccagtaccagagccgcagcttctcccatcagtaatttcagcacaaaagcaggcgttcggataatggcaggacggtgcaatacttctcccagtgttgcggcaaattgatcattatgtactggataaggggcggtcatattaaaaggaccactcaaaccgggcgtcattaacaggtaatagataccattcaccatatcgtcaatatgaatccagggcagatactgttttccgctccccatcgggccaccaagtccgagacggaacaagggaagcatttttttcagtgctccgccgttttttgccagtacaacaccagtacgtaaaagacaaacacgggttttatcactggctgcctgtaatgcaagttgttcccactgcttacagagctgatgagtaaattcatcatgaggtggctcatgctctgtgacaattgtttgattctgatccccgtaatagcctaccgcagagccggaaataaagacttctggtggtgtctggctggcattaatcagcttgctgagttgctctgttaatgtccagcgactctggcacagcttctctttttgcgttgaagtccatagtttgtttactatgggctcgccagcaagattgattacggcatcaaaatcgttgagatcggttttatctttcagactggtccagcattcagcttgattgctgaatagagaataaactttttgaggtgagcggcttagaatagtaatggaatgggatagggaaagaagttggcaaaccagacggctaccaatcaaacctgttcctccagtgattaaaatacgcataaccactcctataacctaaattgttgatataagaactgttgttgatataaaaactatagcatatagcagagatataagggttggtagttaaagatatagctatctgtcagcctgatcaagttttgcggggaaatagttaccccgcagacatattagattttactgtaggcaatttgagtagcggggcgctgactgatagcgtcaaaccattttttcactgccggataatcattcagatcaatactctgacgttcataagcacgaacccacggataagttgagatatcagcaatactgtattcctgaccgctcagatagggtgttttttccaattgggtattcaggacttgatacaagcgctttgtctcttcctgataacgattaatcgcgtaagggactttttccggtgcgaaatgactaaaatggtgattttgccctagcatcgggccaaagccaccgacctgccaaaacagccattgcaggctttggacacgctcacgcatatctttgctaagtaacttgcccgttttttctgccagataagtaagaatggcaccagattcaaaaatagcgataggtttgccaccatcgattggttgctgatcaacaatcgcgggaatcttattattgggcgaaatggcaagaaattcaggcttgaattgatctcctgcgctaatatcaattcggtgaatagtataggaaaggccagcttcttccaggaagagtgtgattttatggccgtttggcgttggagcataatacagatcgatcatggaacctccagtggaacacgtaatggcatcacacattatcattaattggtgtagcgtgtaagctatgttgatacccttcttggcatgaataatgatcttcctgaacagcacgacaggaagatctattaataaaagaggtgatcagcttttcttctggagaaaagcatatttatctggagcttgtttttatgctgccatccgcgttaactgttgcccgacttccgccgtacagatctttcctgaaagtagagtaatctgtgtggacatcatcacggccttctaattgtgccaatatttcctggctggatatgctaaatcctttggcatgtataggagaagagaagggttcggtatagagattcaatccccactgaggcgctaaaccgtggttagccgcacctaaattaacttcaatcatagaatgatgattatcatcaaccagataacctgttgccagccatcgagtgagctctttcatttcccgctccccgcgttgaattgattgctctgttgattcactgctagtaggcgtacctaaagcaagatcatttttcaggcccgcacccaacaacctggccgcagtaataaaacgatctgtggtgccggaaggtgcagcgacagttggcaaattgtgcaaagctgcatccttggaaaatccggtattttctttcacattccagacagaaaaaccgttaccacgttgtacgataatgttttccttagctaattcttgatgtgctttgataggttctgattgaccaaattgatagtcagttctatccagccggttgcgaggatttaaactggcaaacgccaactcccggttggtcaaacgattatcagcctcaagtgaagcggcggctgaccagacactatccttatcaggagccggtgctctgaaatcattctgaacttttgtaagactattgccagccagagccgggttactgataacttcttgcccatttacctgtttagtcacctgatataattcgggattttcagaggcattaaattgattttcatttttaaaagtatagagcgctaattgatcaggtaagggcttttccttcgtggaaccgcgggcaggtgcaaagtttttactttccaagtaaccaatatcaattatatctttgaattctgatttcaattcgggtgatgaatagatcttctccagagtgtcccggaaataagctgagttggtgagatcataataagcagtggccttctccctcaatgttagcggttctgtattagctctatcagagctggcaccattctgccgtgcttcgctaatgatgcgagtaaatccacctgcgccaagctgaccgacaatactaaaaccgggtttatcaccggtataggcattaagcatcttagtgattgcggttaattcattaccctctgcccgaacaaaaagtttcactaggttggataagagagaattaaccgttttgtgggcagcagtgctttcgccggctaagcgagaaatattagcttcaatttgtttattggttgcgacggatttttcattccatcgtgtgataacagaagttggtgctgtaagtggattatcaatagtattattcagcaacggttcacagcagtggcaagttttatctgttgtagttgtttgatgcaactcattttgaggaatatcaatcctagtattagctctctgtattgaaaagtctggcatattttttctccatgatgttattgtattttttgctgtgaactttttaaatttacggcttgagaaaacaggtcaaaccaaaatattgtgggatgaagctgaagtggtgggcttagtttctggaaaaggaagttcagctcttattttttgcaggttccccagaatattatccaagtcagtagcatcgattcgttctatatcttgtaataaacagagacgaatagtttgtgttggctgatgtaatgcgagccatgctccgccaagtatatttatattactgtttaatgagagccaaaattccgcatcactattaataaatgaagctactgtatgatgaaaagtcagcattgatcccgttgaatctacttctaaccaccagggaccataatcaccaatgttcaattgcactgcgccggtagaaagattcaacataatgttggtttgatcggcaaaatctgcgcataatttttctaatttggacataaataaatctcatcaaaaaaatcaacagtaaaatattgcctaattatgaagttgaaacacaaggtagtctatcaaaaatagacaaaaatattgtaagaattaatcagatagatggattatgggtggtaaccaaataatatcgtcaacgtatagtgacggttagcttttatgaagaatttggcgataaacttagcgggataaggtgatattgccaatttcaatacggtcctcggtgataatttttgggtcattttagactgaaggggtagaacgaatatattgcgtggtaatatagtaaaaaaatagagacgtttaaggtgctgctattactttgatatacttggattttatctgattatttaaaactacaatgctttatatgaccgcgacagtaatctgcatattatttaataatattaaaatgaaaatataaataagatttcataattgtgctacacccattttttgtcttcctggcttttgctgtgatgaaaacgatgccaaaaaggcatcaacataattcagtaactgccacataaattgacaacaatgatttcgcgttattgtctcatggagcgattgccataaccgttctattttatttagccacggtgaatagaccggtaaaaacaacagggtaaattttggatgtcgtgccagccagtcctttaccttctgacttttatgaatacagtagttatctaagattaatgtgagggtttccgcatggggatattgatgattcagttcatctaacattttgataaataaatcagaattcttttttattcctttaacataggtgatttgctctgtttgggcattaaggcagcccgcaaggtaatgtttttcgttttttcccggggtgataacccgtttttgttgtcctttgaagcaccagtccgcgccgattttcgggtttagatcaatatccacctcatcttcataaaaaacgggatgtttttctgaaatgttcgctttggcttccgcgatctttgccattttctcatcgtattcgggatcaggttgtttcactgtgggtgccgctctacgccagacaatccccacctgagcaaagtaacgataaaggacattttgcgtcagagagaggttgagtaattcattgagggtatgagtcatgagttcaaggctccagcgagagcggagatagcctaacttttggggggattgctgtaataagaaaagtaagaggttatagagtggggagagatcccagacaacaggtcggccaacgggtaaactttcgagtccttccagcccatataatgtaaaccactgaacccaacgattgacggaagagcgtgcggcatgaagggtcttggcgacataagtcactgtcaatccttcattgagcatcaataacgcggttaatcgacgggaatagttcttatcacgggttttatggataagttttctcattttctggcattcatcttgaggtataggtgctatgataggcatcactcagtccgtgttggggtttgggatttttcgcaattgatcagatcgcaaaaatcggactgagttccctccaagtgatctattattttgaaaagttatttataccctatggatttcaagatgcatcgcgacggcaaaggagtgaatccctgggagcatagataacgatgtgaccggggtgagcgagtgcagccaacaaagaggcaacttgaaagatgacgggtatattatcaataataaaacatcagtatattattaatgaatttattattgctgttctagttgagcatagatggaattttttcattatttaattcatcaaaaataaaatttaatgattaatcatgatagttagtaaggataatatttttatcatgtaaatcaaaatattatttttttgtttttgtggtgattataactctatgtcaggtgaatacgtttgggttttttattttttgtggatttagcatttgtgaaattaaataaatcaatgatcttcattgttattttgttgccatttttcactttatatttttcataattatattcgttttgcatttattgaattttattacaattacagacttgagtgaatgaattttctctcccactattattagtgtatcgatctgataataagtgtcgaactaatattccagaataaaaaaaggaagataataattatgagcgaattatgcccaagcggcactattgatagccaaaaaatgacagaaaattgggtggagtttcaattagttgatgaacaaggtaatccattagtgaatatgccttatcgtctgataagcagcgggaggttgcgagatgagcgcaaaggtgtgactaataatcaaggattgcttcgggaagaaaacttgtcatctgatgcggtaacgttatatatcagtgctcaaccattagctgatgaaatggaacagcgtccattacgggaaaaacgcagtattagggcgtcagttgtcaaaccaaaagcagaaacggaaggtcatcaacaccgttatgtgacaattggacagataagtgatggcttgcctgtcattgataaatggatagaggagaaaccgccacgttatcatttcccagacccagtaccgaaaggttttcgtgttctctcaacaaactgccgatatattttggaagtgtgcccgtttcgtgcatgggtactattgttacatcatcagaaagattattccctggtgaatgcttataatttggcattaatgggattgctgtcatattttgatgataatgttgatatagccggttctattactcatttttttaaccgacaaatgctggatatatcccaattaccgagtaaggtggaaaaaatatcacgtacgcccattgtttatgatgtgccatttagtgaacgttatactgatgttgtatttattgattcaaaagcgggtgaaagtgggataggagatacggagttattttatgtcgctaatcaacaggaaattattgttagctggcggggaacggcgagtgtcaatgacgccctcactgacattatgtatcaaccattgaaattgggttgtgagccagacggtgtatgcagtggttttattaataatggtaaggttcatcggggtttttgggaggcatttaatcttattggtcagttaaaagctcccggttctgatgaaaatgtgtttgataaagttattgatttagctagaagtcgaaacttatttatttgtggacacagtttggggggcgctttagggttattacatagtgcccaactgaaaaaatatcatccttgcttatatagttatgggatgccgcggacattaacccgtagtgcagtacaagaattagaagaaattacacattaccgtcatgtgaatgaaaatgatctagtcccctctatgcccccggaaaaagacttagataattggctttataattattgggggcctttgggttatctatttagtactattgaattgttaggtttaacaaacggtcaggaagttttcttgcatcatggggaaatcgttcacttttataaagctgatctcattattgaaactttaaaaaagagtgattcaaacgatcttatacggctcacagaaatattacctgtcatggcaaaattgtatttgattccgtcattgaataatgaaacgaaagataatatgaaggtggcattggagattcagaaagaattttttaaacagataagcgacgctgataagaacaaatggtttccacgtaatgcaaacccgactttgaaatatgccttgggggtgcctgatcatcgtatgcttaaatatattcattacattggcgatcgaattgcagagttgtttgcgccagacaaatattatttttatcaagatcagaagcaattatttgaaaatacaatgaatgaaaggagtgatattattcctgatattcggcaacgtaatacactatttttgaatatggataaccagttagaacaagcacttattgatactttacaagataaacagagtattttggccttaacgcgttataccaatattgccacacggattgagaaagagttatgatgaaataaaggtgaataaattaaatattaagattagtgaattgatatttataccctatggatttcaagatgcatcgcgacggcaagggagcgaatccccgggagcatagaaaactatgtgaccggggtgagtgagtgcagccaacaaagaggcaacttgaaagatgacgggtatataaccgaataatagaacgctaggaaataatgccgccataatgaggaatatgggcggatgatggttgagattctcttttctaatttgcagggttgataaaatgaagctatcaaccctgttatcattaccagtaaaaatcttatcgggctacagtttcgttgctgttctatttcaagtttagcgaaaaggttgcatgagccgtccgaaacgaataacttcgtagagcctctatcgatttggttgttttgagtaaaataaacgtcttgtagatttgcaattttttgctaataaaaaaggttttttgaagatggaacaagagaatgtagtgaatattgagtggattgatatcgttaatgaaaataatgaagtcatcgctcaggctacgcgtcggcaaatgcgtgcccaacgtttacgacaccgtgcgacttatattgtcgttcacaacggcatgggaaagattttggttcaacatcgtacagtgactaaagatttttatccgggaaatctggacgcgaccgcaggtggtgtggtgctgacgggtgaaaatatgctggattctgcccggcgcgaagcggaagaggagttaggtattgccggtgtgccttttgcagaacatggtagtttttattatgaagcagaggactgccgtatttgtggcgcactattcagttgtatcagtcacggtccgtttgctttacaggaagcggaaattgatgatgtatgctggttgacaccggaggagataaccgctcgctgtgatgaattcacccctgattcgctgaaagcactttctctgtggctgacacgtaataacgattttgatgaaattattgtttataaaaaaaatgagaatagtccaaaaagagttatctaaagtaatctgagtagaaattaatgaggttttacattcttattgattattgatgaagagctggaggggggctgttagccatcctccaatacgacagtaccgttctttcgaggttttgagcaaactgttaataacgtgccgtaaaatatgtgcctgcgacacaagcgccactctatttaagcggtaagtaaatatccgtcagtaattcgtgtgtagcgacttcatgcacaaaattaaggtaatgaaggtaggaagcacgctttaatcgcattaattggatatagcgccctaccggtataccgcagtaattggcaaactgcctgtgaaagtgataacgcgaaaaattcgctacctcactcagttgttccaatgtgagcggttcatccaaatgacgctcaatataattaaatacctgattgaatcgtttgacgtaggcgtcagttttatcattgtgcattgtatcctccaattgagaacactatgcctgagcataagagacattgcctgactgatattgctgattttggcattaagccgatgtggaaaatgttatttcaaatgaaactctaatcgtgtaaggaagaaaataatagcatatagcagggaatggttaggtttgaataatagatagcgtttagagaaaaattaggtttgaataatggttagtgtttaggaaatagaatatccggggaaaaaagactgtttgttgttctattgttgtgatttaatgggtttggtttgatagaagtcgtaaagatattgtatggcccagataatctgggtattcgctatggaaaagtatttctcgatattggagtgccttaataggtattgtcaggaattaggatcatgtgggaccaaatcatagctatctgattcagccgtggatgaggacctttttatataacggttatccattggaatttacaatcagcattctaaggttaagggcttacaatgttcttttggacaggatcatggaatggttatcacattgtttggggatcgcatgagtcaaaattaacgagttatagaggtttaacatggtattttcatcaagacagagttggcattatttagagcccaaaatccaagaattacatgagatatcatccaagcttaattttagatatctttctgatgttagaagcggaagtcgtttcctttttgaaataaatgaactcatcagaacggttaatcatgagataggtacaaattgcttatctgctgatggtggtattgcaatcctgcaagatgaaatagataacctaaagagacaggaatttgacctgttaatgaatgatagccagatatatatgattgttcaaaaagaagaagaggatgaaaaaaccaatttaactttgaaacgaattggttttgttagcggtggttctcagatttttgccggtcttggcgtatgtgtggcctctcttggcgccgcttgtgccggttttggtgtacctctactgatacagggaggaaataatgtttatgagaatgggtattacctgttattaaggaaagaggtttcaggtccggtaagagatgtttatcgtgatgcagctaaaacgcttggttatagtgaaactgatggtgatagagtttacggttatgtagatctggcgttgtctgggtacggaatggcaagatctgttgtgaggcccggaacttttcgtttatttcggtatataaaaactgattacattaggggatggcaggtgatggggaggatacctttgattgctgaacttattggtgatatggtgacaggtctcagtatttattcgatttctgaaggtgagaaacatgaatgatgatgtgacattatcctattacaatgtcttttttgtaattatttattacgtaatgtctattttggtgcttattgtactgtttaagctgagtgaatatgtcaggggctatattagagaggtgatttttactgttattattgtggttattggtgctattcaatatggtatttttgtaaatggtggtgtgctggtatatatattcccacattattttagcattgacgattatgattcaattagatatggtgcgaattttcttttatttttatatccttgtcttcttattatggatagaccctatagtaaagaaaaggaaagcagagataatggtgaaaaagatgagtgatgatgtgacattatcctattacaatgtcttttttgtaattatttattacgcaatgtctattttggtgcttattgtactgtttaagttgagggaatatgtaaggggtcatattcgaacggtgctttttactgttatctttgtgattgttaatactgtacagcataacattgctgtaaatggcggtgtactggtatatatatttccacattattttagtatttatgattatagatcaatccggtttggtgctttgttttttgcaattgcatattcttgtcttcttactatgaataaatctgatagtgaagaaaaagaaaaagaaaaagaaaaagaaaaagaaaaagaaaataattgatatttatttaatggattatagagtgaaatttattttgaagtttgttttgaagtttgttttgaggtttatctaaatacctcccgtttgggaggtggtattttattgagagttaatataccgtatcttcccatatactataaccgccggtccctgcgataatatggttccacgttatacttttatatattaacgatagcgtttcttgaggttgctggtcattattttctaaagagttaggatggagtacactgtattccaatatttgagctccgattagctttaaattaaaatataattctaatcctccatttaaacttgtccgataatggttaataaaacaatccattacttcattattggaaattgcaacacctaacagaggtgttgatttatcaatgggttttctaattatcaccggttgatgtttaacgtttttcttacgtaacattgagtggctcaaaccgtaaaccagaatttcatcttgatggttaacttggtatttattaccaatcgagtcaattgatgaacaacccgcagagatgagtccctgattttttccttttatcgtcagatagattaagtcagccaaaatatatttactcctatgttattggtatgaatgatgtagataagaaagtagttttgttttcagactcatctctctttcttctaactttcgtcatgctgccaagaaggtaaaacataagtatgcttgcctgtttggagagcattttgaaatatcctaagttagtatcaaagaggagaatgctaatcaaggctctttccattcctcaaaaatagcgaaatttgattaaaagtcaatctttttggttggttttaaagcaattgtttattgacgatatcggtgttattaacacgacattcagtaatgcagattttgactttgagagattctgttgggaattattgttggttgattttattaatagacaggaagaatgcagcgttattcttggaagataaagtttgttgtaagcattctgtaagtcaataaattcattttgcaaacggcaatatatagctgctttataatgattcatcaggactaataactgcactataggcgagtgtttaattaatatgtatgtatattcagagtaaacggtaactaaaaagtgtaggagcggattgctcgctagacgctgataggttgttgtctacaaccaacaaaatgttggttgtctccaaatatagatctatacttagagctgaatttggaactatatatggcagtgtaaagtggaggtattctatatgttacagaaggttatgtgtggttacaccataccgataagcaagtttaaatccaatcctagcgcggccttggcggaagcccaaggagatgctattgctgtctcatcaaacaatcagatccagttttatgctgtgcctgcacatatgtatgaagagattattaattttgttgagtttgctcaacgggggacaactgagttaaaaaacattcctgctaattttactggtgaaggtttggatatgaatcagattgctactgagatggcaacgaagcttaaacacggctccactggagattacgaagaatggtcataaaaaacatacaaatttcttcaaagaaggggcaaggcaagccattagtgatttgcgagtttgatgaacaaggagtgctttcagctaccggcaattttcaccttaatgaaagtgagatgaaaaaagttgcagataaaatggcggaattgctgatcaagaaaaagggaaattaacggtggtaagaatattcacatacagcaatttgaaagatgctttgggtgaacaaaaaaccaaagccttggttgatgacttcaaagcctacaaagaaggaaaaggtttgcccattacctttggtcgggatgttccctataagttcacgaataaccgttcttaccttgagttgcaacacttgcattacagagaaagtggtttttcactcaagctggtgcaatttagacgaacgagcggttatgttctagtttactgttctgggttctttgaccgaagtacctatttgttaattgcgattattaagcactggaatcacaatgaatctaatgacatagtgggaactgacagagacattggattaatggacgagcttgaaaagattgccgaacgcttcagggaaaaattttaattttgttgatcttcaatctttatatgaatttattgttgattgattttactgatatacctaatggacgcaatgttgttcttggttgtgaaatattaagagtgatacgagaacaaaacccccgggcagaatattctgtcccgggtaatttagtgatttaagcgaagttgtattttctcgttatattgaagcgttttataccctatggatttcaagatgcatcgcgacggcaagggagcgaatccccggcagcataggtaactatgttaccggggtgagtgcagccaacaaagaggcagcttgaaaggtgacgggtatatttattcttccaaatgaaaggttaaaaccaccggctttagccggtcagctttagctgcgatactgtgttgtaccggaggtgcaacatggattacagatatggcagccacacggtatttcagattgaataccattttgtgtgggtaacgaaatacagatacaaagtgctgacaggagaagtggcaagtcgagtgcgagaattaatccgtcagacatgcggctcctttgaaatcagaatattaaagggagttgtgagtcaagatcacgtgcatatactcgtcagcagtcccccaacattagcgccaagtgaaatcatgagaaggctgaaggggagaacggccagtaagctgtttgaagaattttcgcatttgaaaaagcggtactggggccaacatttttgggggcgaggctatttttgtgcaacggtggggcagttaacggaggaaatgatcaaaagctatttagaacatcattttgaacccaatccgaatgataatttcaggatggataattgacgcgtcgtttagccgacgcgtatccggactttcagtccgttaatcactaacccacctactttagtaggtggttgtttattttatttctggcatcacaccaataaacgatctctttttcctgggctcagatatcagagattcaagttgttcaacacatttcagataatgagaggtttgcttgtgtgtgttagccgcgttttcatcaacataggcttcataaatataaaagcgggtagggatattttcatcccgtaatacatcaaaacgtaaattgcctgcttctttaattgatcccagatgattgaggcgaaaaacttcaataaattcgtctaatttgtcttgcttaacattaatttcaaccaaagttacgtgcatctcgattctccttattgtttttcacttaaaaataactcgtaagctttgctggcattctcattctggtgtacgactgcttgaaccgcttttaacatggcaaccggtgcttcggattggaaaatattacgtcccatatcaacaccggcagccccttgatcaatagcctggtaacacatctccagagcttctttttctggtaactttttaccaccggcaatcacaataggaaccggacatccgctggcaatacgctcaaagccagtatcgacataataagttttaatgatttgtgcgcccatctcggccgcaatgcgcgtcgccagagaaaaatagcgctgatcccgaaccatatctttcccaacgccggtgactgccattgttggcataccgtaacgcattccctgatcgactaatttgataatattcttaattgattgatgctcatattcagagccgatatagacctgagcggctactgcacagacattcaggcgcaaagcatcttccatcgcaaccgcgaccgcctcattggacagctccgtcagaattgagttggcaccggaagcccgcaagaccaccggtttgttggtcgcgggtggaacctgactacgcagaataccgcgggtacacatcaagacatcggtatggggaaacagcggagcaatattgatatcgatgcgttcaagcccggttgttggcccctgaaaataaccgtggtcgaaagccaacatcaccgttcgattggttttgggattaaaaatgcgtgaaagtcgtgattgcattccccaatccagcgcgccgcagcctttcagttcaaacaggctgttcttctgcgggatatcaataccaaaatctttaccatctttaatatcatctaaatctgccattttttttctcctaactcacttacattggtccagcaaccctgcatggtagagattgctggacagtcgtattagaaatcgtattgattgatattgtctttggtgaaaatgacccgttcaggcagaacaacaataccgtttcccttagcttcatagcggtaaccctgaacgcggtttggtacaacttcaaccatgccaatatcgggaatatctagtttatcaccgacatttaaatcacctttcttgagtaattcattggcgacatggattgaaattttgccttgattaaccacatcccatagcccgaattgcttgacggttccgcgttcaacataagggcgcatgacattgggggtgctgaaacccacgattgcaacattttgtcgtttcagattttctgctgcttgtgccgcggctggcagggcattggcatccggggcaataatggcgtccagatcactccaggcttttaagatcccttctgcggtttgtaaggatttggttgcatcgttgtaaccaaactgggtggtaacaatctcccaacctggatgttccgcggcaattttatctttagcttcttttacccattggttctggtcagtgaccgttgggctggagtagaaaaacgcgaccttggcttgctttttttgcacctgattggcagccatatccaccagcattccgcccagttggtttggcgttccttggttaatataaattgaacggcattccggtgaagtgtctgaatcccaagtcaggattttcactccccgttgcatggcgcgtttcaacgcggggcacaggccatccggtgaaaccgcagagaccacaatagcgttatagccttggttcacaaagttgttgataagctgaacttgcccggcaacactgggttcagttggcccatcataggtcacattgacacccaaggctttcccggcggctaccgcaccttggccgccactggtaaaaaagccgacaccgaccagtttagggatgaaagcgattctttcggcggcgtgtacccaagaggcgcaagccagacttaacaggctaattagagccagttttttcaggattagggttttcattactctctccatattgttgggtttcagagggactgtaatgtcataaaattcaatctgtaggtttatgaagacaatctctgatttcgccatcgttgtatccagtcacggatttggtggtggtgcaagctgatggaacgtcctaccacggcaataattaacagggcaccggcaagggcactggatacctgactggggacgccggccatttgtaacccctgttgtaaataaccaattaataatatagccagcgcggtaccgataattgaacctgaaccaccataaatattggctccgcccaatactaccgcggtgatggctggcatcagaaatgacgcgccaaggtcggagcgcgctgatccaaaataagaaactaatacaatggcggcaatagcagaagctatgccggtcagggaatagagaagatatagggttcgggcaacaggaattgccgcgtaacgggcaactttactgctttgcccaatcagaaaaatattgcgtccactgtgggtacgatgcatgaacagccagcaaataaggacacagagtagaaatagcatcaatggcataggtaggccaaacaaagtcaaattggcaaaatcagtcaatgcgggtggaaagccaccaataccttcgtaaccggttgcaccggagatgccggaaagcagcagggcactgccaccgaacagatataaggtaccgagtgtgataaccaacgggttaatgccggtatataaaatgagtgctgcattgattattccacatattgcaccgaccagtagtgtcaaaggaatagcggcggccattggaataccagtctgattcatcactccgagtgatatcgcgcacagaccaatagttgaaccgaatgaaatatcgataccgccactgacaataaccatagtcagtggcaaggccacaatcccgatacagataaaatcactggtactcagcaacaatatattgatatccagcatgcgcgggtttgctatgccaaacagcagaatttcaataatcagtaatgcggctaaggcgaattcccagccataacgttgaccgatattcattatgtcacctgattacttttgtcatttttgaggaaacgggcatatttctgttggcggatatttttttcgatggcacaacgaaggcgtccatcaaaaatcaataccgccagcagaacaaatccggcaataaaatcattccaccaggcagggagttttagcagtactaatccgctgtttatctgcgtcaggaaaaatgcgcctaaaatagcaccgatcactgtaccggtgccgccaagcagactgataccgcctagcacgcaagctgcgatagctctcatttccagcccactgccggtctgattcgggataaaaccgatctgggaggcaaaaacaattccggccagcgcggccatgacaccattcacggaaaaggcgataatttgaatgctatctgtacgaacgcccagttgacgagcgccttgcaggttgtctccggtggcgtaaaagctccggccaaatggggtttttgctagtatccacgccattgctaatatcaggatcattaacaaccaaccgatcggtgagatattgagccataaaggtgcggaaaggcgttttaattcgtctggtaagccttcaatccatttaccgtcagtaagcaataacatcagcccgcggtaaagccccaacgtgccgagggtggtaacgatcgcaggaattttcaaccaggtgaccagtgcgccattgaaaaatccggcacacatgccgagcagaagagtcaacaggcaggaaacggacaggctaaagccggcattcagtgacattcccataatgaccgcgcataagccagcaatcgagccgacagagacatcaatattgcgagtcagcatgaccagtgttgcccccattgcaagcaagataaggatctgcgcactgctaaaaacgagggtgacagtttgtaagctaaagtactggtggtcgataacactgagtaagccaaacaggcagagaatggcaatcaatgcggtaatttcgcggttattctggataagtttcaacatgatgccgcctgttgtggtttatgttcgccgaaagcgatatgcataatggtgtcaacatccatctgttgcttagttaactcgccattgatttctccctgatgcatgactaatacccgatcagcgattcgaaccacttcatccagatccgatgaaataaaaataatggccacttgctgttgggcgatatgacgaatcagttggtaaatatcattgcgtgccgcgacatccacaccacgtgtaggttcatcaataatcaggacggcggggtgagcttccagacatttagcaatcagaattttttgttgattaccaccggacagcgttttgattggttggttgatatggctgaatttgatatttaggatttggcaatagcgttcaagtaccgctgtatcataggcagggcgtatccagaatgtattgcggttgtgggttagtgagcagatattccagccgagtgatgaatccagaaataatcctgatgactgtcgatcttccggcaaataaaccaaaccttgggccagacgttgagcagtttttagcccattaacagtatgttgttttaacttaatttcgccggataccgcagggcgcaggccataaagtgtttcagccagttctgtacggccagcaccaacaaccccggccaaaccaagaatttcacccggtttcactgagaatgagatattgctgaaaccctcaccgctcagcttggtgactgtcagtattggtcgatcaggtactgtctggtgctggttattgctaagatccagacccaattttggggtgccatttaatggctgatcttttgcggccggtgtaatagcctgaataatgtcatccgttgtgtaatcgcggattttgccacttaaggcaatagtgccgtcacgcatgacactgacctgatctgctagttggtaaatttcagggattttgtgggaaataaaaatgatgccgacaccttgctgttgtagctcacggagctgggcaaataagcgttcggtttctactggtgtcagggaggcggtaggttcatcaaggattaagattttcgaattacgcatcaggccacgcataatttcgaccagttgttgatcggcaacattaaggctgccagcactgacatgtagatctaattgacagccaagtaatgccagtagctgtttcattttagacttatctacctgatgctttggcaaacgaaacaggatgttttcctgtacagacaaattcggaaataacagtggttcttgtggtatcagataaataccgaattggtgggctttagtgggattaagatggctaacatgatgaccgctaatcttgagcgtgcctttatccggctgttcgagaccagcaataatcttcatcagtgttgatttgcccgcaccattaccccctaacagagcctgtatctgccctggaaacagagtaaaatcaatatgtttcagtaccattacgccggaaaattgcttactgatgccactgacttctaatagcggtggtactgcggtgttgttatgtaacatcgcggcatcctcttacatgcaggtgcggaggcaaacaaaatgaacatttatctatttaaaaaacaattgttcagcatggtagctgttaaattgtgatcttggcaatatttaaatcatactttgtgaaaaatttatatattcattgaattgtgttcaaatttttgcggtaaaattctggcgtgttatacgttttaatggttatctgttgagtgcggataaaagaaagtggttatgtcgataaaatcagtgaaagaaaaatcagctaaagagaaaaatataccgtctgaggacgccagtccgggtaatagcatgagtgaagaagagctacttgcgcgtattgcatggttttactatcacgatggcctgacacaaggtgacatcggcgatttgcttggtttgagccggttaaaagtctccagattactggagaaagggcggcaatcaggcgtcattcgggtacaaattaactctcgttacgaggggtgtttggcgctggaagataccctgcaaaaacatttctctttgaaacaggtgcgcgttttgcctgcactggcgaatatgaatcttagtgccagattaggggttggtgcggcacatttgctgatggcattgattgaaccgcagcaattattggccgtgggatttggtgaaaccaccatgtgcgcattgcaacatttaagtggttttatctcatcacaacaaattaggttagtcacactatctggaggtgtcggtccttatatgaccggtattggtcaactggatgccgcctgttcaatcaatattatccctgccccattacgtgcttccactgctcaggttgctgaaacatttcgtcaggagagcagcgtccgagatgttttgctagcggcttgtgcggctgatattgctatcgttggtattggtgcagttaatcagcaacagcaggcgacaattatgcgttctggttatatcagtggtggtgaacagctaatgtttggtcggaaaggcgctgtgggcgatatccttggttattttatgcgcgctgatggtgaactggtggaggatatgcagattcatcaggagctgattggtatctccatgccagaactgaaaaccatcccgacagtgattggtgttgcgggaggggaagagaaagcggaagccattattgctgcgctgaatggtcaatatatcaatgggctggtgacggaagaacagactgccagagtcatgctgaatttgctgcgttaaaccctatatttattctatccgtgaaagtaagcagaaaaaatttgaggtaaagctatacccaatggatttcaagatggatcgcggcggcaagggagcgaatccccgggagcataggtaacgatgtgaccggggtgagtgagtgcagccaacaaagaggcaacttgaaagatgacgggtatataaattcaaaaagtaattgaactgaggatagcatcatgaatcaacgccgtagtgctaatccatcgggaaaatatctgatggcgcttgatgcaggaacagggagtgttcgtgcagtgatatttgatcttgaaggaaatcagattgccgcagggcaggctgaatggatacatcagcctgtacctgatgtaccgggttcaatggagtttgatttagcgacgaactggcagcttgtttgccaatgtatccgtcaggcgctgaaaaccgcacaattgcctgccagtgctattcagggagtggcttcttgctctatgcgggaaggtatcgtgctttataaccgcaatggtgagccgatctgggcttgtgctaatgtggatgcgcgttccagccaagaagtgagtgaattgaaggcgttgtatgacagcacttttgaatatgatgtgtatcggtgttcagggcaaacattagcgttgggtgcaatgcctcgtctgttatggttagctcatcatcgcccggatatctatcatcaggcgacggccttaaccatgatcagcgactggctggcaaatatgctcagtggtgagttggcagtcgatccctccaatgccggtacgacaggcatgctggatctggtaagccgtgattggcgtcccgatctactggaaatggcaggattgcgttctgatattctttcgccggtaaaagagacgggaaccttgttaggttacgtcacggagaaagccgctgttcaatgtggactgaatattggcacaccggtcattatgggcggtggtgatgtacagctcggctgtcttggtttaggtgtggtcaaacctgcccagaccgccgttattggtggcacattttggcagcaggttgttaatctgcctgaaccggtcactgacccaaatatgaatacacggataaatcctcatgttattcccggcatggttcaggcggagtcgattagtttctttactggcttaaccatgcgttggtttagggatgcattttgcgcggaagaaaagctgttggcggagcgtcttggcgttgatacttatagcttactggaagatatggcggccagagttccggcgggcgcttacggtgtcatacccattttctctgatgtgatgcggtttaaagcttggtatcacgcagcaccttcctttattaacctttccattgatcctgagaaatgcaataaagcgactctatttcgtgcattggaagagaatgccgcgattgtctcggcctgtaacttggatctgatttctgctttttccgcagtgaaaccggattcactggtattcgcgggtggtggttcaaaaggaaaattatggagtcagattttatctgatgtgacagggttgccggttcgggtgccgatggttaaagaatcgaccgctttggggtgtgccattgctgccggagtgggggttgggctttatgatgcaatgggggcgacgggggaaaaattggtgcgttggcaacatgaatatcagccaaatcctgaacattgtgaagtgtatcagaaggctaaacaggactggcaggcgatatacgccgatcaattaacgttggtcgatcatggtttgacaacttcattatggaaggcgccgggattatagcttgcaatgagttaatctgccgtattgctgggtgcgctcgtgctgataggcgacttgtgcaccaagtattcccttaatgcctgaaattgtgtgatgtcgtggtagtggtttgtgataacagtgaatttaccagtattcatggtctggctgcttcaataatactgtgatgtggatctagaattgaaaggtaccgattgtatttcttaatatgggaacaaattcaaaaagaagaacttccgaaagtcttggaacaggcatatcttcttaatgaaccgtttttaattgagatccctgttgcttacgactataacctattaaagcatgtagcttgattcgatgcatgatttatggatttgatatacttatagagtaaatttatatggacgcaagaactgactattttattcagtccgcattagaagtttttggagagaatctccttggtattgtggaaactgattcatatctccgtcaacccgattattcttctcggtgtgtgaggcatttctacgtgattttacctgataatttcgtcacaggttgcattacatcgctaagataccttcaggcggagttttttgagtttaccctaaattatcttacgattaatgagttgtcatattatccgcctcattgtatgtggcaatttactaagaatccttggctcttacggtcggaaaaaataagtgatgtggtactccctaatatcaaaggaaatcttgatatacccgtaatcattgaagatgcttgattttatccgaaatggagatcattatcctcgctatgaaaatattcattaccgatgaacaaaaagccgaacttgaacatctccatcacacctgccgtgataagagggagtgtgatcgcatcaaagcggtcctgctggcctctgaaggctggagttcagtgatgatcgctcaggccctgcgtcttcatgaaatgaccgttaaccgtcatatcagcgattaccttaatcaaggtaaacttaaatctgataatggggggtctgatagtttgctttctcaagaacaaactgattttttaatcaatcacttatctcaacatcttttccatcacacccatgaaatcgtggcctatgttgctcagctctggaatattacctttagcattcccggcatgaataaatggctacaccgtcagggtttttcttataaaaaaccttgtggcgtccctcataaattcgacgcagaaaaacagcgacaatttattgaatattatgagaatcttaaagtcacagcgaaagacgaacccatcctttttcttgatgctgttcacccgactcaaggcaccaaactcggttatggctggatgcgaaaaggcgagaaaaaaacagtaaaaacaacaggaagccggactcgcctgaatatattgggcgcgctcaacctgaatgccattggtcgtacggtgttccaggaatatcaaaccatcaatgactacaacatttgctgttttttcaatgaaataagaaagtcttatcctgactatcatcaaaaaattcatcttattgtggatggggcgggttacaacaaagctcatcttgttaaggagtgggcttatgttagcaatattgagttacattaccttcctccctatagcccaaatttaaacccaatagagcgattatggaaggtcatgaatgaacaggttcgaaataaccgttattttgcggataaacatgaatttcgagacaacgtcttcaaatttttcaccacaacgctaccggatatagcggactcgctgatgtctagaattaacgaccattttcaggtgctaaaaactgcatcttgaagtttcttgggtatatatatagacaagcagtttttagcgttgctcatattgcacgtctttactacctcagaaacttgacgccaaagactcacgtttggggagtacgccagcttggttgggcaatgcgttacgccgaattggggctatatcgtttgctcgaatcgaaggaactatcttgtattcacaaaaatagtgcatatgttttgaaaataccaacagaagatcttaattggctggtcacttgcaatacatcttggcaaaagtttgaaaaagaacttttatccaatattaatatttttcgtgatgcagcggcacggttaagtggaatcgcggagtactattcgacgttgttgcagcacttttacccggagacacgtattgtttcagcacagggtaaagtagacgatcttctttcattacaaccgattattgatcaagtgattattcttttaaggcagtttattggagatagattattagccttttatctccacggtagtgctgcccgaggtgatatgagaagtggttcagatatagactctattgttatcgtggataaggtcgatacagttatccttgaagcaattcgctcaacacaatctaggttcaaggatttatccatctctgtatatagtgaatcgaatgttcaccagtatcctagtttcagagcatatgcgctcattaatggaactaagcgtgtctatggggatcttgctttagaaatgaaaccgtcattgaaaagcgatatatatggcattattaataatttatttactataaggcaaatagctcgttcttatctgatttctggtacatatggacatcgagcacattatatgcttgggctgatgatgaaacttaccgatcacggttgcttacgccctttgcaaatcctaaaaagtggtttctatccaacaaagaaaactcaggttttggaatattacagagacaacgaaattttcaccgacattattaaatatacgcaaaacctaaaagaaagtgagaatacgctgaagcaaaaattgcttattggaagtcgagcggaattagaaaatttattctattcattacttgacgcatgtgaaatagtggcagagaaattacatatggtacaggtcgagaagtcaattttatagacggaatgatgttagttcttttagctaaacatattacgatgagtaagatattgattcgtatccaaacatcgtcattagctagtgtaataatttgattattgtaatcctatttaaatcaatgtgtcagtttaatgaacatatattatgaagaggaatagagcatgacatcgaaaattttggcaagatcaattaacgaattttttgaagtacaacaattgtcagaccaaactattctcaagccaaatcgaaaaataaagatgaagatactcgatgaaggtttaatgcaaacagccatctgtagaagtaatataggtcgaatcgatgaaaaagagttgaagcttgagtaccgaggccataatgtccgagacctagcaaataactattcttttagtgatgttgtgtatcttctgattacaggaaaactaaattcagaaggaagtgaagagtttttagatatgctccataacaattacctatcagcactcaagcatattgaaaagttaacaccagtaatattcgatactactcccactgatttcctcacaattgcagttttatcttcgcagggtaaatggctttctgactgttctgtaaaaacaaaggacgaacgtttgataattactgcatctattttggcagcaatagctgccgcaattgctatatatgctcagaaatatgctatatccgaacctgtatttaaaacttttttcggtactaagcatcgattctttgcaagctttttagcaacatgttttggccaacagtgtgacgatgtagcagaagaaatgttaaacaagtttttaattcttcatgcagaacatgggctgaactgctcaactgcaaccgttagagctgtagcgagttccggtgcagatccatttaatgctgtagctgcgggtatttgcgcattcagcggtcctcttcatggcggagcgagtggggcagttggtttaatgatcgatgatatacacgacaattctaaaaatattagtacttttattgatgaactagtagaaagaaagcaacgtcttatgggatttggtcatcgaatttacaaacaaccagacccacgagcttcttacatgagcgatattcttatcaaacagaaggcaaaattcgatgttatttcttcctatgtaaatatttcacaggaacttgcatcggaagtatcgaaaaggccgtatttttcgcaacggggattatacccaaatccggatctatttaatgggttgctacttcgtagagctggtttcaagtcgcacatgaatactgctctcctttgctttagtcgtgctgctggttggttggctcattactatgacagtattgacagtaaagcgccaattctgcgaccacaggagctatatttatgaaaaaaaagcataaaccagtacggaaactaatcgtatttggatgtggtcctcactttttaaatagatatttagatgttctattggagtaccgcgataccattgaggttatgcttatagttgacttgaaatgccgagaaatgaaaattcgctgtgcattaaatgagaagggattaaagcccagagcatacttatttcttgatgaaaaatacagaaattatccagattcagacgaaatttacaggttactttctgcaattccagaagtctatcaggctgatgctgttatagtgagcactgaaccaaaagctcataaagtatatgctctatgggcagccgaaaatggactgaacgtgttcatggataaaccaataaccgccccttattcgtcaaacgcggaaaatttaatggtagattttgcagaactattgactgcttcgagaaaaaccaacagtagatttgtaatcagttgtgaacgtcgaatgcaatttggatatagatatgtggaaaagtttctaactgaattcatgagctcattccaaatacctatcacatcaatgcatgttcattttggtggcgggtggtgggtaattccatcggaaatgctcaatttggaaaaccatccacttaaatacggttatggagtattattttattctgggtatcattatttagatctggtcgctcgctttgcactctacaataaaaaaatacaggatatagacctcctgaaaccacatgtcaaaacaatggtagtccgcccaaatgcgctagcggaagctctaccatttacgacttattcacatgcccttaaggaagaggataaaaatcaagatcaaattgcacatcaattgtcggactatggtgagttagacttctcagtaataggaaattattccaaaggtattcaacatcgaatgtttttcagcatggatctgatagaaacaaccttaactggcaggataatgccgaatagtattccaagcgatggacgaatacgacaggaaatcgtaaatattcatctagggcatttctgctcaattagcatcgtatcgaattcttttcggaaactgacagaaggtgacacgataccggaagattttaatataactattgctacccatccaatgtttacccggaggggagaacaaactgtgttacgaatcaaccgcaaagatctatcacagttaaacccaagcctccctctatgcgcgggcttgaatgtccacgcaagaaaagagcagcttcgcgattttttaagtggtggagatgcgaactcagagttatcaactcacgaaaattcagttgcattgcttgctgcggtttatgaacaggtctctaagacaaacacagttcctcaatagttcaagtagagtagaggccgagttatgaacggaaaattagatctgctaccttttactacatttgttcgaggtttccttttttgggccgcagctactgcggccgtgggttatatacctttgtttgtagaaacaacggatttttccacaacacaagcagccgtcttcctatcgggaactgctattggaagaatggtattccagcctattatggggcaatttatctcacctaaaaattgtttacagatatataccggtgcattaattggacttatgtcttgtagcatctgtttattcctttttagcaaccctgttagtttactattgtgttccagactgctggaaggggcttttttttcaggattcattatctcttggcgaacgcagcttaatagattttcccaatctccgaattttgagtcggtgaatgatagctatgttatttcccaaaatgctgggcgtttagcgggtccaatggcaggtgggattatcgttgcgaagtttgacctttatagtgttttcttattctcagcaattctgtattccttgtgtctgataatattgccccaaaaaactgctattacatctactgacaatcatagtcgtgaacatattcggataacgttagctcaactccttagtcgtaattggaggttacttctggttcaccatctggaatttatgtgtcttggtttatggttagcctcatggcctatctttgctgtatacgctagtggattcaatccaatagaggttggctattcgtttgctgttgcggctgcgggaggtttttttgttttaccactgcgtaagctgttacgaaaaatagctttaaaggcacgattcgtcatctctcttatacttttgtttttgcaaccgagcggtgctcttttgatatcagctcacttaggcttttgggtaatgttactattgggtggtcttggcagtaccatttatttcactgcctttcatcagtttatatcgaagacttatcctgttgaacaaatacctgcaatttatggattcttaggaacaagtactttcttagctcaagcagtcggccaagctgtaacaccatatgctcagcaatttggtggagttgatgcaccaattattatcgacgctatattgcttcttatcatgatatcaatcgcttttagcatatataaaaaagggagtgagaaatatgactgattctaattttttcttaagtgaatatgatggtgtcgcgctttcgcctatttcatttctaagacgagcaatactgagtaatggagatgatattgctgtcatagatggagaatgtcattggacttggagccaatatgcatctcggtgtgaaaggcttgcaatagctttgaaaaaaatgggcgtttgtaaagaaacagttgtgtccgcgcttctacccaatatacacgagcttcttgaattacattttgcggttccaatggcaggcggtatcttgaatgcgctcagtacccgaacggactcaaatactttaaattttatatttaaaaaacttaatcctaaggtattgtttattgatagaacctttatttcactgttggatgatgtttctctagacaaacaagtaaagatcatcgttattgatgtggatggcgcagtcatttcagaatcaatttctgaccgggaatttattcaatatgaatcgctgataactacgcataaatcgggagagttgtctttttctctacgagatgaacaagaggcgatcagcataaatgtaacttcaggaacaagtggacaacctaaacttattgtctattctcaccgtggcgtgtttcttaattctatttctaatgttctggattgggatataccaaaacgaccgacgttcttatggacgttaccaatgtttcactgtaatgggtggtgttttccgtgggctatcactgctcggggaggtacacacatctgtatgcgcaagtttgacgcagaagaagcgatattgctaatgcagaagcataaggtaacacactattgtggagcgcctattgtccattgcgcattaggtactattgcgcggaaacaagggctgcattttaaggagaaaattcatggattagtcgcaggtgcgccgcctacagagatgatgttttctctattagattccattggaatagcagtaacgcaagtctatggtatgactgagacatatggcccggtcgttgtgtgtgaagagaagagcgattgggagaagctctctaaatccgtaagaatatccaagaggatgcgtcaaggcattgtctcaaatttacaaggtcaagtttgtgttattgaggaaaatacgggattacaggtgccttttgatggaaagactgttggtgagcttgtaattcgtggaaatatggttgcatcttatgatccagatcggcatgtgactcttgatgcagcaagtcaatggcttttcacaggggatctggctgtcgttgaaaatgatggctatgtcagaattgtagatagaaagagagatattattatttctggtggtgagaatatttctagtctggaattggaaaatatactgtcaaactatcccggtgttttagctgccgccgttgtagcaaagccagattcacattggggtgaagtaccgtatgcatttatagagctcgaagaaacttcatcagttacagagtatgaattggacaattatatttgtacggtaatggcgcgctataagcgccctaaaggttatacttttttaactttacccagaaacgcaagtggaaaaatcataaaagggcaattgagacaattgattaggaattcctgagatctcaagagtgggataggtttttagaatcacatgtctttcattgttattaatgcagatttttatctgtgaattcagagaacagagattttaaattaaagagatgattattagtcaatggaaatatttcagggaaatgttctaaagtgaaaataataacgtcaattatgtttttcatgatgataatatggatattaataaaattaacgcaggaaacattgaaaataaattttctttacatctattattaaactgataatttatctttatagttaagaggagtgaattttatgacattggtgattcaagatgaatagcactaaaacagtcagtatccaacatgttattaataatcaaaaattctcgaaagttcaatggcaagtattaattttatgtttcttaattgttgtgattgatggttttgacacggtattaatggggtatattgcaccagccgtggttaatgattttaaagtagaaggtgctattcttgggccggctatgagcgccgctcttgttgggttatcattgggttcgatttttgccggtccacttgcggatcggttcggtcgaaagtcagtgttgacaatatctgtcactgtttttggcctgcttagtcttgctaccgctattgccgattcaatacagacattaactattttgcgttttttgactgggttaggtcttggtgcggcaatgtcaaatgcaataactttaatatctgaatatgctccagagaatcggcgatctttgttaataaatatcgttttttgtggttttcctcttggtgcagcggtgggtgggataatttctgcatggattattccacattttggttggcaaggggttttgattttagggggtattctgccgttatttctatcgctatttctcttttctctattacctgaatcacttaggtatttggtttcgaaagggggggcagaaggtaatataagacgaattttgtctaaaatgaccggtaatactttaaatgatataaataagtttacctttgatggagaagaaattatacataagtcgtcaattaaaacggttttatctaatcgattcttaattgggacggcaatgttatggataacctattgcatgggagcattggttttttatgttctgacaagttggatgccgtttttaatgaacgatgttggtttcagtgttagcatggcggcaacattgacagcattatttcctttaggaggcgtaataagcacggttttttccggttggttaatggatcgaattaatcctcataaagtagttgcaactaattatgccctggctggtattttggtcttttttattggtcaggaagaaaatgtattattattgagtattcttatatttcttgccgggataacgatgaatggcgctcaggcgtcgatgggatcaatctctgcacaattttatccgactcattgtagggctacgggagttgcctggatgttaggatttggaagatttggtgggattttcggtactttatttggcgcagaattgatcaggcttgaattaagttatagcactatttttgccattttatccattccagctattatagccgctttatctttaacatttaaggatgtgagttatagaaggcataaatagatgattttataagaataataggtggttaatatattctaaatgattaatcttgaataattgaaatatgaggggatactttgctgttaattaattggtaaagaatgtttgatactatgttggattgtaaattttaatatctatgttgtttttaaaataatatcaatcataaattttaaattaatttcgctattggtttttatgattttaataaataattgaatataggtatttagttataaatatatatagtgaaaaagttatattttatattttaaatttgaattaaatatagtatgtcttaaaattaaattatttaaattggagggtgtttataccctatggattttaagatgcatcgtgacggcaagggagtgaatccctgggagcataggtaactatgtgaccggggtgagcgagtacagccaacaaagaggcaacttgaaggataacgggtataaataggatttcataataccgatacagttagtctatttgattgatatctgaatagtgcaaatttgatgcttgatagaccgtactaactcataactctgctatgtatgcccttgctacacaaggagttgtacgaagtggagtactattttggaatagttatttatttacaacaactattcaatgaatgccattcatttaaatgagtttttaacttgtattcgcataataataaccactttatcaaaatatcgattaccgccagataatattttcagaatgaagtcaaatgacttacccatcaccaaattgaaattatcaatagctcatcatccaatatatagcttttctggtcaaccctcagcccattccatttctgaatgggatctgggtcaacagcagggtattcggcaagctctcatcaataaaataaccgccgatctcatcaataaagggtgtcatgaattctgttcagatgccaaaatcagtaataaacggtcacatcaggcgcatgaacattgaagtttcgaatcatttgtttctgcaaacaactcacctaaccgcgttccccatattcttagggtgtcatttcgccccctataaagttgcttcagtctgaccggtttcagcttcgccgggcaaacgtaaaagtaaccatcatcctgaataagaacaaaaatgccgatcttaaatatcggcattttgctgtacaaagagaagattaatttaatgctttaacgtttcaattttatcccggctcagtccggtactggtgacaataatatccaaactcacgccatgccgtaataaggcacgagccgtttccagtttaccttccgctcggccttcctctcggccttgcacaataccctgctcaataccttgttcaataccttgttcaataccttgcttgatacctcgctcaagccctttttgttcaagctgttctgcaatagtcatcaacatcgtttcatgctccggagattgctgtttcagtctgaccggtttcagcttcgccgggcaaacgtaaaagtaaccatcatcctgaataagaacaaaaatgccgatcttaaatatcggcattttactgtaaaagagaagatgaatttaatgctttaacatttcaattttatcccggctcagcccggtactggtgacaataatatccaaactcacgccatgccgtaataaggcacgagccgtttccagtttaccttccgctcggccttcctctcggccttgcacaataccctgctcaataccttgttcaataccttgttcaataccttgctcaataccttgcttgatacctcgctcaagccctttttgttcaagctgttctgcaatagtcatcaacatcgtttcatgctccggagattgttcaatcagttgatggacaaattgtgagagatccggcgtatgtccattcagtaaaatatagcgtaacaccacattgcgctgctcagttgtattataccccgcattcaagagttccaccaattggaggagccattcctgcatatcccgacagcgaatatgtttttgcaccagctccatcagggcaacccctttatgcgtcaggatctcttcatcgctgagcacactgacgtccaccaacggaaacgcctgacggtataagcgagccgcctgttcggggagcgtgaaacaatccagccaccggtttgagtaaggatacggccgaatctcaccatgataaaacagcagaggtgccaccaacgggagttcagtatggccttttttcaggtgagccgccatggctaacatggcataatacatcagccgccaggccattaacgggtcaggggtggactgatgttcaatcaggcaatagatatagccctgtccccgggccgtttcgaccgagtacaacacatcactgtgcagttgacgtaaatgctcatccacaaaactgccgggctccagtttcaatgtggctaagtcacacaacgactggatttcttcgggcaaataaagggatagaaactctctggccgtttcaggctgcgttaaaaaatatttgaataatccgtcatggtgaggccgtttttctttctttgccacaatctgtttctctgtcttattagttagtcattaccatttatagtatttctaccaagttacaaaaaacattgtctcagatttcctcaggcaaatctttaccgaatgcattaatagaagagcctaaagaatcaaatatcagaaaaggaaaaacaagaaaatattatatttacaacaattactttatgaaaaccattcatttcaatcattttttaacttgcatttgcataatgataatccctttatcaaaatatcgattacttatatttccgttaatcttggatttacataataattgtcattctcattaagagaaaaatttacaatggattttgctaaaaccctacgtcttaaaacacgctaaaaaagtatccttacaagtgaaaacaaaccttgacttataattttaattgtatatttttagttcataacactattttaagctaaattccaaacaacaggttactcattatggatgctttagatgaattttacgaaagaaacccttccgccagaggatacttggataacagtaccaaacataccgtccaatacttcattttctgacatcgctgcccccaaaagcggtgacgatttatcaacaagttttttaaatgttatgggatggtgcttggcattctgatcctaagttaaagagtgattaagattataaatggctttcccataataccgatacacctatacccgtcatctttcaagttgcttctttgttggctgcactcactcaccccggtcacatagttatctatgctcccggggattcgttcccttgccgccgcgatgcatcttgaaatcaatagggtatatacccgttatctttcaagttgcctctttgttggctgcactctttcaccccggtcacatagttttctatgctcccggggatttgctcccttgccgtcgcgatctatcttgaaatccattgggtatatgccttttgttttctttttgaacaatattggttctgtagcctatctcattgattctacggaccgcttggatggaaaggttgtatgtcttggtacacaagggctggttggaagtggaacataattatggaaacttatttaatttgggcgatagtcaatattattgagtaatatatagattacgttgtgtattattataaggcaatgaaaaattaagttattttaattttaaattgtttctttgtggttattgatataataacgtttgtatttttttatgttctaattattacaggatatatgtaattaagttaaatataatttgtatttgttcatttgtggcatattcattagcggtattgtcttattgttgaaaaataattttttatgaattatttttagcttgacgttatattttgatatgattgaatgtgcaggattattttatgcctattgaataactgtctttgaaattagtatgtccttttattattgtaatgaagactattttataggtgattgtcaaagtagtattttgataattaaatgtaaattggtctattttatttttaaaatacttaatttgtttttgaaatcattttaattaggtattaattgaaaacagataaagttaaaggttatttggtcattatgaataataaatgcagtaaatggttaagtttttaattatgaaatttaggatcagtcaacaaaagttgcagtaaattaattgagcttatctgaaaaataggaataaaaatggaatatttcattctgttatcaggataattggcattgaagataggcagtaagtagccgctattaatcgggcagtggcatccggtatctaagtctcttggatggatagcagatgtgtctatttttatttttgggcaagaagtaggagagaaacattagtgatgactgtcgggagtgacggttctcaaatttctaacagattcgttgaggtagtagtagatgaaaaataatattgctaaagtgggaagtgcatttaaaactcagacgtcagaaaatataaccgatgcaaatgatgtttcacaacaaactcgaaatacaaagaatacccttcaaagactcacatccagtgaattattctggtatgagcgtcttgctgcttttcaacccctccagttacctttcgaaaccgccggagaccaaacagaacctatatgggcaatgagcgcttggcagccccctctgccaaaaaatggtgaagaggagccattgcgaacgttgttgcagacttttgtcatttaccttgcgcgtttgactcagcagaccgtattccaaatcggttggagcgtggataaggtaaaagatgaatcggcaaatctggcaccggtggtgcctatggccgttgaggtagcgtttgataagccttggcgtgaggtagctggctgggttgatgacgagttgtcccgtttggtgcagtacggcacatttagttgtgatctcttctcttgctctccttcattgcatgctatcccggcgttggcgacaagtcggccgtggcgaatcgctgtctcgttgatcaagggtgataggccacgcgatcaaaaggtatccggcgaattgttgaccttccagataaatgcacagggagggtttcgttggatctacgatgaaaaccgcctgtgcacggaagtcgttttacggatgagcgagcacttacaggtgctggcagcctcgaaaaggatgggggatgaaattcccattgggcagcttaatttgttgccagaggccgagcgaacattgttactggaaacttggaacgcgactgaaaccccctatcctgatccgttatgtattcatcagctatttgagcaacaggtagagcaaactccggaggccacggcgttagagtatcaagggcagcgcctcagttatgccgagttaaatgctgacgctaaccggctggcgcaccagttgattgcactgggtgtcgtaccggaccagcgggtagcgatttgtgtggcacgctccccggcgatggtggtggcgctgctggcggtgctgaaagcgggtggggcttatgtgccgctggattcaacctacccggcggaacgtctggcgtatatcctaaatgatactgtcccgtcagtggtattggctgatgcgaccgggcgggccgcgttgggtgatgtcgcgctagccgggttgaccgtgcttgacccgaatatcctacctgatcaaccggacagcaatcccttagtgacggcattgacaccacagcatctggcctatgtgatttacacctccggttcaaccgggcagccgaaaggggtgatgatagaacatcaggcgatttatcaacgtcatctgggctttaacgacacttatgccgtcactgagcaagatcgggtgttgcaatttgccgcttttgcgtttgatgtttcagtcgaggaatttttctcggtattgtgtaacggggccacactggttatccgggatgatagctggctagcttcggtacgggaatttattgctttaacccggcaacatcgtatcacgatcgtttctctgccgaccttattctggtctgaactggcggccagagatcccgagctaccgctgccggattgcctccgactcgtcatgattggtggtgaggcggtaaaaaagaacgccgttcaggactggtttatgcaggaaggctaccggccccggttgttgaatggttatggcccgacggaaaataccgtgacagtgacttataaggagatattatccccggaagatgcccgttctatcggccggccggttaaaaattcccgcatctatctgttggacagagaggggcaaccggttccattgggtggcattggcgaaatgtacattggtggcgtgggtgtggcgcggggttatctgaaccgacctgcattgagcgcggaacgttttttaccggacccctttagtctggaacccgatgcgcggatgtatcgctccggggatttggcccgttttctgccggacggtgagctggaattcctgggccgtaacgatgagcaagttaagatccgtggcttccgggttgagttgggggaaattgaaacccgtttggtggaacacccggcggtacacgaggcggcggtgctggtactggatgacgggcagcacaaacggctggtcgcctatgtggcggcacaagcgcacgagagattggccgctgatttgcgtgaatatttgagtgcgattttacctgactatatgatcccggtcgcttttgtgtgtctggataccttcccgcagatgccgagcggtaagctagatcgccgggcattaccggcactgcgggaagaagattttgcccatcagatttatgaagcaccgcaaggggaggctgagatcgctctggcggctatctggcgtgaattattgggcattgagcagataagccggcatgacagtttctttgcattgggcggccattcgttgcttgcggtacgtatgattgaacgcctgcgtcacttggggttgacattaacagcgcgtgatctattccagtcgccggtgctgtcagcgctggctcaagcattgggacagcaccaagctgtgataataccgcctaacatgatcactcccaccaccacggcgttaacgccggagatgttgccgctgattgatctgactcagactgatattgatcgcatcgtggagcgggtgccgggtgggatgagcaatattcaggatatctatgcgttgtcgccgttgcaggacggtattctgttccaccacctgttggaacaggaaggcgacccgtatctgttacactatccggtggtctttgctaaccgatctttgctggaccgttatctggcggcggtgcaacaggcgattgatcgccatgacaccttacggacggcttttatttggcaaggattatcagctccggcacaagtggtcttgcgccgggcacagttgcccgtgacggaactgacgctagacccggctgacggcccagtcattgaccagttaacccggcgttttgatccgagtcagtatcgtcttgatctggggcaggttccgttattgcattttgttgtcgctcaggaaacggacggtcgttggtttttactggaagtgcagcatcacctgattggcgaccatgaaacaatggaagtgatgcatcgtgaagtgcgggcctattttgccgggcaggaagagcacctgcctacgccagcccctttccgcaatctagtggctcagtcccggctgggggtgagtcaggaagcacatacccgcttctttaccgacatgttggcggaggtggatgagccaacgttgccattcgggctggcggaggtgcatcgtgacggatctcgcatgacggaatcccaccggatgttgaccaccacgttaaatgatcgcctgcgcagtcaggcccggcgtttgggtgtcagtttggcagcgttgtgtcatctggcttgggcgcaggtgctgtcgcataccagcgggcaagagaaagtggtgtttggcaccgtcctgtttgggcgtatggcggcgggggaaggggcagacaatggcatggggttgtttatgaataccttgccgttgcgactggatattgacgagaccccggtagaggatagcgtacgggcggtacatctgcgattggctgaattgctggagcatgagcatgcttcactggcgttggcccagcggtgcagtgggatacagggtgaaaccccactctttagcgccctgttcaactatcgccacaatgagcaaccggcggcgttggatgagacgatggccgggattgaattcttgggtgaacaggaacggactaactatccatttgggttgtcagtggaggatgggggggcttcgttggggctgaccgctcaggtggtacaaccgtttgaacccgatcggctatgcggttatatgcaacaggcgctggaaagtctggtggaagcgcttgaacagaccccggagacgccagtacgtgtgctgaacgtcctgcctgaaacggagcgcacactgttactggaaaccttaaatgccacggaaaccccctatcctgacccattatgtattcaccaactgtttgaacaacaggtagagaaaaccccggaagcgactgcgttagtctatgaagggcaaacgctcagttatgccgaattaaatgcgcgtgccaaccgctttgcccaccaactgatggcattgggcgtcacaccggatcagcaggtggcgatttgcatggcacgttcaccggcggtagtggtggctttgttggcggtgctgaaagctggcggggcttatgtgccgctggatccgacttatccgggagaacgtctggcgtatatcctgaatgataccgctccgtcagtggtattggttgatgaagctggtcgggcggcgctgggtgaacaggcactggctgggctgacggtacttgactcgaatatcctaccagaccagccggacagtaacccgcaggtagccgaactgacaccacaacatctggcttatgttatctatacctccggttcaaccgggcagccgaaaggggtgatgatagaacatcaggcgctgtatcaacgtcatctgggttttaatgagacctatgcagtcaccgcgcaagaccggctgttacaatttgcctcttttgcgtttgatgtttcagtcgaggaatgttgtttgtcattgtgtaatggtgccacgttagtgatgcgtgatgagcgttggttaacctctatgcaggaatttattgccttagccgggcaaaaccgtatcacagtgatgtctctgccggcgttattttggtccgaactggttgccagagacaatggattaccgttaccagattgcctcagactcatcatcattgggggtgaggcagtgaaaaagagcgctgttcaggattggtttacgcgggagctccaccgacctcgactgctgaacgcttatggcccgacggaaaataccgtgacggcgacttgtaaggagatattattcctgacagatgatcgttctatcgggcggccggttaaaaatacctgtatttacctgctggacaaatacggtcaacccgttccattaggctgcgttggtgaaatgtatattggcggcgtgggtgtggcacggaattatcttaaccagccggaattgagtgctgaacgttttatagccgatccctttagtccgatagccggtgcgcgcatgtatcgcacgggagatttggcccgctacttgccggatggtgagctggaattcttgggccgtaacgacgaacaggtaaaaattcgaggcttccggatcgaactgggggagattgaaactcggttgatggaacaccctgcggtacaagaggcggcggtgctggcattggatgacgggcagcacaaacggctggtcgcctatgtggcagcgcaagcgcatgagagattggctgctgatttacgtgaatacttgagtacgattttacctgactatatggtaccggttgcctttgtacgtctggataccttcccgcagaccccgaacggcaagctagatcgccgggcattaccagcaccgcgggaggaagattttgcccgtcaagtctatgaagcgccgcaaggggaagctgagatagctttagcggccatctggagtgagttattgggtattgagcagattagccggcatgacagcttctttgtgttgggcggccattcactgctcgcggtacgcatgattgaacgcttgcgtcgcttggggttaacactggcggcgcgagatctgttccaatttccggtgctgtcagacttggctcaaacagtgggacagcatcaggttgtagtggtgccgcctaacgtcatcacgtcagccactacggcgctgacgccggaaatgttgccgctgattgatctgactcagactgatattgatcgcattgtcgggcaggtgccgggtggagtcgctaatattcaggatatctatgccttgtctccgttgcaggacggtatcctgttccatcacctgttggaacaagaaggcgatccgtatctgttgctctatccggtgatctttgagaatcgctctttattggaccgttatctggcggcggtgcaacaggcgattgatcgccatgacatcttacgtacggcttttatctgggaaggattatccgttccggcgcaggtggtctggcgtcaggcgcggttgcctgtgacggaattgacgctagacccgacggacggtccagtcattgaccagttaactcggcgttttgatccggggcattatcgtcttaatttaagtcaggcaccgctactgcattttgtcatcactcaggaaaccgatggacgctggttcttactggaattgcagcatcacttgattggtgaccatgaaacgctggaagtgatgcaccgtgaagtgcaggcctattttaccgggcagggggatagcctgccggcaccggtgcctttccgcaatctggtggctcagacccggttgaagggggatcaggcggcacatacccgtttctttaccgacatgttggcggcggtggatgagccaacattcccattcggactgacggaggtgcatcgtgacggctctcaaatgagggagtttcaccggatgttggcacctgagctgaatgatcggctgcgtagtcaggctcggcatttgggtgtcagtttggcggcgttgtgtcatctggcttgggcacaagtgttgtcgcataccagtggtcaggagaaagtggtgtttggcaccgtcctatttgggcgcatggaagcgggagaaggggcggacaatggtatggggttgtttatgaataccttgccgttgcgactggatatcgatgagaccccggtagaggatagcgtgcgtgcggtacatctgcgactggccgggttgctggagcatgagcatgcctcactggcgctggcccagcggtgcagtggtattgccagcggtacgccactctttagcgctctgttcaactatcgacacaatgctttatcggccacatcggatgacgtcatcagtggtattgaatttctggatggacaggaacgaacgaactacccatttgggctgtcgatagaggatgggggttccacgttggggctgaccgctctggtggtgcagccgtttgagccagagagactatgcgattatatgcagcaggcgctggaaagtctggtggaagcgcttgaacaggccccggagacgccggtacgtatgctgaacgtcctgcctgaaacggaacggacattgctactggaaacctttaatgctactgagaccccgtatcctgatccattatgtattcaccaactgtttgagcagcaggtaaagaaaaccccggaagcgaccgcattagtctatgaagagcagactctcagttatgccgaattaaatgctcgcgccaaccgccttgcccatcaattgatcgcattgggcgtcataccggatcagcgggtggcgatttgcatggcacgctcaccggcgatagtggtggctttgttggcggtgctaaaagccggtggcgcttatgtgccgctggatccgacttatccgggagaacgtttggcgtatattctggatgatacggctccgtcagtggtattggttgatgaagctggccgggcggcgcttggcgaagaagcgctcaccggattgaccgtacttacgctgaataccctgccagatcaaccggacagcaatcctttggtggctgcattgacaccacagcatctggcctatgtgatttacacttccggttcaaccgggcagccgaaaggggtgatgatagaacatcaggcgctgtatcaacgtcatctgggttttaatgagacctatgcggtgactgcgcaagaccggctgttacaatttgcctcttttgcgtttgatgtttcagtagaagagtgctgcttgtcattgtgtaatggtgccacattggtcatgcgtgatgatcgctggctgacttctatgcaggaatttattgccttagcttggcagaaccgtatcacagtgatgtctctgccggcgttattttggtctgaactgattgccagagacaatacattaccgctgccggattgcctcaggttcatcattattgggggtgaagcggttaaaaagagcgctattcaggattggtttgcgcgggaaacccaccgacctagactgttgaacgcctatggtccgacggaaaataccgtgacggcgacctgtcaggagatattatccccggctgatgatagttctatcggccagccgcttaaaaatacctgcgtctacctactgaacagagacggtcaacctgtcccattaggctgtgttggcgaaatgtatattggtggcgtcggggttgctcggggctatcttaaccagccggaattgagcgcggaacgttttatagccgatccctttagtccggtatccggtgcgcggatgtatcgcaccggggatttggcccgttacttgccagatggcaatctggaattcctggggcgtaacgacgaacaggttaaaattcggggcttccggattgaactgggggagattgaaatccgattgttggaacacccggtggtacaagaggcggcggtgttggtgtgggaggatggacgggacaagcatttggtcgcctatgtggtagcggaagcgaacgaaggtctgacggccagtttgcgtgcacatctgagtgctattttgccggattatatggtgccgtcagcttttgtgcgtctggataccttcccgcaaaccccgaacggcaagctagatcgccgggcattagccgcgccgagggaggaagatttttctcgtcaggtctatgaagcgccgcaaggcgagacagaaaccacattggcggcgatttggtgtgagctattgggtgttgagcaggtcagtcgccatgacaacttcttcgtattaggcggccattcactgctcgctatgcgaatgacgaatattgccgcgggtcgagggatggtttgtacattgaataccttgttccaattcccggtgctggctgaactggccgcaaaaattacctcggatttactgtctcaaccgcaaaacagcgccatatcggtacgatctgatggaacagagctgccgctgttctttgttcccagtggcatgggtgattactcctatgctttcgggctggctcagcatattgcgtcgggctacccgatttatgcgctgccttggccgtccatcaatgaagaaccgatgtcaacgatggaagagcaggctgccagaatgatcactttgatgaaagccgttcaaccggcaggcccatatcggataagtggttactcttctggtggaatattggcttacgctattgctcaacagcttttgggggctggcgaacaggttaatttcctggggttgattgacacgctcgctcctcattgttttgatggacagagctttggtcagcagatagcgcaacccaaacatcaattttttgctgaactggtcaggcaattaggggaagaacattctgaagagattgcggcattgtatcaacgaatcgatgaattgaatttagtgcaatttattgccgcggcgcaggagctggcgttatatcccgtcaatctgagtgctgacttaatggcaaagcgttgggaacagatagagcattatgatcaaatcgtcagagattatgagccaccagccttagcggtaacgttgcatcagttttatgcgatagaaccttacccgcctatttcttttgtggcggatgaagggtcggagcctttaaatatcgatccatccttaggttgggagcaaataatagctgatacttcgcttaaactcattgctattccgggagaccactttagtttattggaagataatgagaataaaattgctttatctcaggctttaaatatggcgctggcaatcagtgatgaaggggaggtggtgtaatattgatatataccctatggatttcaagatgcatcgcggcggcaaaggagcgaatccccgggagcatagataactatgtgaccggggtgagtgagtgcagccaacaaagaagcaacttgaaagatgacgggtatattaatgatttaaccttgatatgataatccggtatatattgtttatatcggattatttttattcacatctgacgtggttccgtataataattgcaacgtaatgtactcaatatattgagtacattaaatattatatgaattcagtaaatagcgttctgaaaggcagttgaaataggttaataaggaaaattaggaaatatcattattcatgataaaagcaaaaacccctttattttcaatggggtttgtcagagttatgaaaaaacctctaatgaggattttcagtagagtttatcttgctctacgttccttcgtagtaagcggagtaagctttacgtccattatataaacaaggtttaacaacccctttaagatgccatgtaatatttataccgttatgcatttgtgtaaatacgctagcaaaattgttatcaggattaacaacatatctagtatacgccaagccattatagcctatattctgatttgggcagggagaaagatgtgcgtttgcagtcccaatgcctccgattaatgctgttgctaatgctccaactaccaatgatttcttgaacataaaagttttcctttaatattttaataactgtagtcattttattaatttcacattaagtgtatcgcttttataaagtttgtcaaaattttaaagttagaaaacatttattttaatcttgttaatattgagattttattttatgaaataggaaaaatatttgctggggaatataaaatcacatgtaataatgcatgttaaatcatcacatggattatatttcagttttaaaatctgcttatatttttcattttagattagaaatctaacttattatttacaaaaacttctcccataatattaaggctccctgccgattagactgtctccaaaaggcacaattaaatggacagaaggagcatttcgccccttctgttatttctcttgttacattaggagggcagtgatggtgccaacatagtctgcgaagcctgacggattcgcgacaggtgttcgcgggcagcgccggtatcaggaaacgaagccatagccccgctcagtttggctaggttcggtctttccgcccccggtactgcgtcaacggcatgggttgtgatgacagattgcttgctggcccaagacagttccaccagacctttcttggtgtaacctcgctgggtaaagccttcgaccaggtgatccacgttgatcaccgacgaggaaccttccagctcgatttgtaaatgccgatgggccatagcctgactgccaaatacctgacgtaccatcagggctgttccgttgctggaatcggttaacatcaagtcgtcatcgcggcgattcaccaagatgctttccggatcagctaatggtaggatcaggcggtccaaggcttggctccggtcgtcgttgtcgatgactatcgtatggtaatgggaccacatcgccttgctgaggcggtagatatcgttatcggctccgccatgcagtaccacgctgtcgacaccatcaatgagcggtggcgtcagatcgtctttgctgccgtcaacgcctccaccttgaagcagaagggacgaaccgatacgctccacacccgtaaacttgttgagcatctgcgcgttgccatccttgatctgatacagggcctgagtcatcgggctgtacacatacgccgccttttcgccagcggcgatccccacgaagcgcagattatgtgaaacagggatgccattactccaaaatacctgaccgctgccgatatcgaaccagcctagctccttattgtcctgcaaggtcaatacccctttggcctgccactggtcggcgagtttggcgagtgcctgtggcaggtgggtcaggttgttctgccgccagcctttgtcaacgccaactagctgcaattcgccgttgttggttcgcagcaagatctcgcccttgaccgtaatcaggcgcatgccggtatcgacttgttgcgctgccttaagatgtaactcgggtgtcaactcactggcagagggaagttgtgccgaggcgctaagtatctggccggtgccaccaaaagccgcggctaacgcattcgcggtcatggctggttggcgatatagcttgccgctttcgggttcgaagagccgcgcggaggcaccatctgtttcgaatcccagaaattgcaacgatttgccctgtagtgccgctgaagccaccactacttggccgttgtggtaccacaccggcagcaggctattgccgtcggtacccttgactccaaacaccgccagagtggtggtgctgtcggtgatgttagccagatcctgccaccagtgggtacgccccttgagccaatgctcgttaaccgcttcatagttaagctgcccctgcgcgtcgagccgggccacacgcccatcttcggtgatggcgagcaggcttccgttcagattgaccagattagccaacgctggcgtgttgatgcgtaatgcgctgggatggttggcgtcgagaaccatctgtccggggccttcctgacggaacagaactttttgttccttgctgtaaaagaagaacacttccacttccttgccgccgggctgaggcatacttcccgctagcactaagtcggccgggatcggccaggcactgtgggcctgttcgtgtgcttcgaagtgcaaggtccgatccgccggtggtgccagattcggtttgatcagcgtaccatcgccggtgcgtatccagtagcgatgtgccacgccagccgcatccacgccgaacaccgtgaccagcgccgcactggtcggctggatcaaccgtgcgcccagcgtatacatcggagtttcacgttgaatgctattgttctcgtagccttggagtatagttttgagctcatcactatgcaggccggtacgggccgaaagctggagtagcgcatcatcacccaccgcactgaccaactccattcggtcaccgaggagccgatagctcagttcagcttccttcccttttagctgataacggcgcgccagatagaccgcattcccctcttgccatagccgacagatctggcctgcactctggttgaaccaaggctcaaactgagcgtcgacctgtcccgtggcgatgtctacccgccatgccgccgcattatcggcgtcgtagaaataggcatggtcgcccatcactgcacccagttgtgcatgcctggcttgtttgtggggggtgtcggtgaacagcatgcggtctttggctacgtcgtagaacgcccggccgacatttcgctcgttgtatctgtagttctccaccaccgcgtactgcccgtgcaactgatgcgccttggctagatcgctcagatgctgctcgatgctatagcccggcacctgccacttgctcgcatcttcgcttaccacctgagttgtcaagttggagaagtcaacttcgcgcacctcgcccttgcagttgactaccagcacttgctctttccgatctgaatcgagttcgaccaccactccaccaacgaccagccggttcttcgacacactgatactgtcactggcgagctggctgctgtcgatgatccagcgtgacggcgcactgccgaccagattatgtgggacatcgctcgtgagcttcacgctggcgctttcgttcagcccgatcaggtactcgccaccggcacccttgatctcgtaatgcaggtagccatgcaattccttgggtagctcgggcactatcagttgccggttgcgctggtcgagcaccacttcgattggtgtcgccatatattcctgatgaatcctacgaatcgtcacctcccccggaaagatgtagaagtcgtagtcgaatcgtttatcctcttcaagcctgcggatcacatcaaaaccggcatcgtgacgcgtagttgcgctagggagctgtatgtattcgtaactgatgaaggactttggggtaccgggcaggatcagcacattgctgtcactgtggtcgagtttgtgggaaacgtccttgtaaccgatcccgctgcgtacctcgattgcttggctgcggtcacggaccatctttggaaaatcgccgatccagaagaaataattgattcttcctgaaccggtagagcctgaatgggtgcggtaaatgtactgactgtcgaagtcgatctgatgctttcgcaaatccagcgttttgatcacagccccggccagaggcaccagcactttcttctcattatcatatcgatagccattacctttgtacgccttgtcgattgtatcaaagtaacggcctaccgccttggcatcctcggcgaccacaccaaaggcttgcgccagtgccgtaaagcctacagcgagcccgccaaggatcactcctccagaaccgagcacagcacccgctgttgaggcaccgactaaaccagcccccactccggctgtacctgtgacgaagctagccgagtcaaacgcaagctgggtaccgaacaccgccttctgtacatcgttctcagcgtgagccagctcataagcatccagaccgaccattgcgccgccaaatagcacgcctgcgccttcgttgacggtgtgccccagaatggaggtaaagtccttgagtgaggtttcggcggccaccacttcgccgcgcaacgccgtacgcaccagttcggtgaccttagtcacgtcctgcacgccaccgtgagccatctggacaagattgagatagctgtggaccttgagcgcggtggccagatcaggcgaagcgatcccacgtgccgcatcattgcggttcttgtcggtaaaccattggatcaatgactgtatcgcaaacccggcgtttagcccatcaactggagctgcttcgccgataccgcctttgggctgtatctggccgtgttcgaaggtgaaatgttggcctagggtgagcacatgttcatcgacaaagcggcggaattcgataaaagtggcatcgccgctgctcacccaacgggtctcctcgggttggtcgcgattgatgaactggattcgatagtggcctttgccttggtcctcggtattgccaatcactggcatccagcgctgatcaaggttgttttcttgggcgatccgtgtactggcctcggcgaaccttgatccccactgttcggcatcgagggtcgctaatgcagtgtgcaaccgggtgtccttggcaatccgtacttgggtgttaaccgcttgctcaacctgccgccgttgctctatgaccgtagtgagttcatcggggcgagtcaggtcggccacgttcagatcgttacccaccggcacttttgccatcttactggcatcgatctccaccaagttgaagataggggtcaacttgtcgccaagcgaaccgtagtgagctgctagcttgcgtcccaccaagtggtgcttcatggcttcgaggaagcggcttgtattgttgaaggcaaaaattccgacattcggatcatagaaatagtaacgacgtccttcgagtccgaccatacttcctaccatcatcgagtgatttggggtattgagcgcgaacgtcgaggtcttggtcgcctttttcagcagggaaaccacttcggacaatgtaacctgtcctcttgttgttgacgcctgtacggcctcaaggttatcggagtgcaatttgatcagactgtttttcagcagcgtggaactacctgcgtggggatcggcggctgccagaaacagtttttccaccagattgttgatacccgcttcgccgctgttagccagcgccaccgccatcgcccggaccaagggatagcaacggccgccggacttgtcgccgaccagcgacaggtaaaagtcctgtggcaccagacggtcgaagctactaccagcgcggtgaaaatcctcgctgtacaccgccgtccacttcaataccttatcgatgtattctgcttgactggtttcagtgatgtgagcactcaaggcactttgttgcttgggagtgagctggcctttgagaaacaggatcttcatttccaaggctgacatcctgtcgtacattccagggatgctaatatcgcggaagttacgctgaccatcggtaaacgcggtgccatgcacacgatgttggtaagcatcggcgatcacataacgctcgccgatgctactggtgtgctccagtccactgttctggatgggcgtattgtcgatccgcaccacggcagccatgccgtccttggacttgatctgctgccataaccagctttgttcgacgaagcctgcttcacgcagaaccgtattgtattgcgccttgtaatactccagagtgatattgatctgttttatctgttggtcgatcagattgtgctgagaggtattgcgttgctcctcatagagtttgcttcgtttgtctactagctgcttgatatctgcgttgatcttgtcgtcaacttcggcatgtaacttagtccacgcggcaattgctggatgatcaggagaaaattcaccctctgtgtatacaccgtcggcgatcccttcgactgataccccgaattgggtagcgactttctttagttgttggtgaacttgctcacggtaagtggcgaattgagcttggttgcgttcagtcacttgactgtctgcgatctggatagagagtggctcctcgtcgccacgtaactttagccgaagcctctggccgtcttgctgatactcttggcgctggaacaccaattgccattcgtcattgacgtactgcatgtacgccacggcgaggctgtcggtggtggcagctacccggtaatctttgtcgtccactgccatcaccacgttatcgtatagcagtgaactgttgactcggccatcgtggtagacccggtaggtattggcatcgaggctggtcactaccaccgagccacccgatagcgtcccggtaaatagaaaactctccgcgatcgcatgcttaggaatatctacgtaggctggtgacgcattggcctgatcggcgctgtcgtagtcgagaaaatacgcgggtatgctgttagcgcctgctgctacatcatcattagcgcttcgatcagtgtattcgagctcgtacaagcctgattcgattttcactagctgggcgttcccttctgctgggaaactccccgacctgattaatgtctcggtattgatagtgttggatttggcgaacaacacaggatcggcggcgaactgatggatattggcactgacctgacgaggctcagaatcgccactcattggtgccagcgtccccttgagctcgctatcccgtagtgcttgtgagagcaacgccgggttgtgtacatcgtacccgcgtgtctgcaaggtatgcgtcagggtcttctcgattggaatatcggtcagcaaggactgtgtacctgctgccgcaatcagttgtgcccgggactgaccgtgactgctcgatccgcccgcggccgtttcagagtaggaaatgcccttgcccacgcgatacatacctgtcggggtgtgttcgacaaaggctgtcgccggtaacagttcgctaagcttttcgctgatggtttgagcatgctcgatcccggctttggaaaggtagatcacagcttggtcggtacggctgcccagatttttcggccccatgatcttggcctgttccagccagccgcgattgttatcattgaacaattggggcaatgcccgggcaagcaagttgaaatgcgccttgttaacgttgatggtcagtcgtgcaccaagcttgccgcgggtgccataacgttgcgcaaaatcctttggcagcatccggaaagcttcggcattgtttagggcgtcatccgtttgcaaagatagcgctgttttctcattgccttgcaccaaaatgtcgattgttgtgatgcgtgttgccagtgtcttgatataactgacaaatgcctgttgctcgcttttgtcgaggcgactgatgccgaccggtctgtcattactgtagcgccaataagcgttgctctccagcgcacgttccagcattttctgttgctggaacaattcgggactccactcgcgaccattttcacggaaccccttcttgatctcttggaccagcgtttggattttcggtttgctcctcatctctctaaaggtcgcttgtgcagacgcgagcagtgattgatagttgttactgggaataatggttctccttaggaaaatcctactttgatatttacggattacaacgcttcaagaatggctggctatggcggacacggctagccgtctgtgatctaagaatctttcatctgcaaggtccacagtcgggcataaagcccgttcaaggcgagtagttgctcgtggctgccctgttcgaccacctgaccttggtcgattaccagaattcgatgggcatggcgcagggtattaaggcgatgggcgacgctgatcactgtgcggccctgtgcaatgcgttgtaggttggtcatgactgccgcttccgactcgtagtccaaggcactagtggcttcatccagtagcaatattcccggattggtcagtagtgctcgggctagggcgatgcgttggcgttgccccccggagagttggccgccacgctcgccgacttgggtctcatagcctcggtccagcgccttgatgaaaccatcggcaccggccaaagtcgccgcttcatacacttccgcatcgctggcctgaggccgacacaaacgaatgttctcggcgatgctgccggcaaacagcacgctttcttgcagcacgacgctcatgttgcggcgcagcgccaccggatctgcgattgccaaatctatcccatccaccaacacctggccgtgctgaggtacatagaggcgctgcaacaaccgagccagggtggatttgcccgaaccggatggccctgtgataccgatgaattcgccgggatgaatctcgatgttgaggttgcgtaacacctcctgaccatcctcgttgtaacgaaaacgcacgcctctgaaacttactcctccctgtagcttgggtacggaggccagaccgccattgccgctttccccctcctcatcaagaatgtcgccgatcctgcgcattgagatcagggtatgctggaaatcctgacagacttgggccagacgcagaattggctgggtcacgtgttccgagagcatgttgaaagcgaccagctcccctgggctgagtttgccctccattactagagtaacaccccacagcagtagcagggcggaggttagcttctggattaggtcgattccctgaccagccaagatccccaccactttggcgcggaatgaggcgcggacgaaggcagatagctgccgctcccagcggtgtaggaagccggcttcggtggcgttggttttgatggtttcaatgccggtgactgactcggtaaggaaggcggtgttgtcggcccctagctcgtactctcgcaatactcgggcacgcagtataggcccgacacctagccagaacaggaaatagagcacgagagaaccgagcaccaaccaggttagctcggtggcgtaggagaacatcacagcgacaaacaggccgatgaaggccaaatccagcaccatagtcagcgctgaaccggtgagaaattggcggatctggttcatctcgcgcactcgggcgatgatctcaccggtctgacgctgttggaaatagcccatgggcaaggtcattaggtgctggtaaaggcggccggagagctccgagttgaccttactggcgaggttggtgaatagccaggaacgaaggaaaccatagatgggctcgaacaaagccagagtcaacatggcgattcctagcacttgcaggctcgataggctgcggctaaccagtacccgatcgatcacgttctcgaacagtatgggggttactagggcgatcacctgtagcatcagagacactaggattacgttcctaaactggctgacatgtttgcggatggaaggcacgaaccagccgaagccaaaccgctgccgtttcggctgctcggtcgcctccgctagcagtacggcgctgccttgccaatggctcgcgaagagggttcggggatagcgacatatcttacccgtacttggctgatacaagataatgagctcgccttcgactctctctagcacctgccagccctgttccgtatccagcaggataggaaggggcacggtatcgagacggctcatatctgtggagatgtggcgtgccctcaggccgatccactgggcgcagcggcatagatcttggctgttcgagactccttgggtgcgtccgagacggtggattagttgttctggttccaccgccaagttgaaatggcgggcggcatgggtcagggccagcaggccgccatccgctaccgccttggacgtgtcgacggtgatcggttccgacagaatagattcgatggttgacattatcgttccctcaatgcttcggactggtactgttgtagtgggctgagtaggtagtcgatcacccgccgatcaccggtgcggatttccgcggtgatactcatgcccgcctgtagcggtacctcatgctggtccactgcaatagaggagcgctccatctgtatctgtgccggaaataccaaaccgagctgttcatccttgaccgcatccttggagatgtgggcgaccttaccccgtatagtgccatagcgggtatagggaaaggcgtcgaccttaatttccaccggctgaccggcgtgcacgaaccccacatctttgttcaacaccatcacttcggcttccagaggggtatcatcgggcacgatcaccatgagttgctgggccgattgcactacgcctcccaaggtatggatcgctagctgctgcactacgccgtcgaccggtgtccgcaggctttgcagccgccgcctctcaccggcctttatcaactgttgtgtcatgaccgcgatagcggtctgagtttcgtttagctggtcgtaatattcccggcgggtcttggctaggtagcgctcccgactctctttcagtacctgatattgctccttgaggacggccagctcggcatgctgttgagaaagggtgcgttcgatctccagcttctccttctcttgctccagtagctcgactttgggtaatagcttgctggcggccaaggtacgacgggcttcaaggcgcactttgatattggtcatcagcttttccagcgcggtgatatcggcgttacgtgcactctggctcgcttggttgacgctcatctcgctgtccaggctttctaaattggcgactacctctttccagatgctgaccagatgctctctggccagctcgacctgtgcctgtggcataccttcctgtacggagaaatgttcaatgggggtatcggttagcagagcctgtagtctagccatctccagccgcttgaagttaagttgctcctgtagctccttcaactcggcttcgacgcctatggggttgagtttgatcagcacatccccggtcttcaccctttgtccgtcacgcacgtgaatcgccacaatctcgccggcttcaagggactgaatcactttagagtgactggataccagcagcctgcctgtcgcgttggcatggatgtctaggtgaccgatgatggaccagagtagaaccaccaacagaaacagggtcagtgccattgccgtgcaccttgcccaaggcgcgggaggtcgttcaacgatctccagatagccgggctgaaactcgtactcgtcgcgggtgcgcttcgtcgctttgggcgcgttacgctcctgccgccaagcccggaggacggtttttaggtgtttcttgaatgacattattccgcttcctttcgtaattcctgttgcatctgccacagcttggcgtagcagccgcccttgaccagtagttggtggtggttgcctgattcggtgataaggccctgctccaaagtgatgatgcgatcgcagtgacgcaccgtggacaggcggtgggcaataatgatgacggtgcgccctagtgcgatctcggccatgttggtttggatcagcgcttgggattcgtcatcgagggcactggtcgcttcgtcgaagatcaagatcttggggttagccatcagcgcacgggcgatggcaatgcgctggcgctgccctcccgatagggaactgccggcttcggccagtaccgtgtcatagcccagaggtaattgcaggataaagtcatgcgcgcctgccagcttggcgacggccatcactttctccagcgaggcggaggggtccttaaatgctatgttgtggcgcacgctacggttgaacaggtagttctcctgtagtaccaccccaatctggctacgcaggtagccggggtccagtcggtgtaggggagtgccgtcgatcaagatctccccctcatccggagcgtagagcttctgtaataagcgggtcagcgtactcttacctgaaccggagggaccgactatgcccagcttctcgccggacctgatatgcaaggtaaccccctgtaatactggggcttgatggggctggtagcggaacaccaagttgcgtatttgcagatcaccggagagtggttgctgaggccggatgttcccctgttcctgctcgacaggcaggttgagtatgtcaccgagcttatcgacggcgactcgggtttgaataaactgttgccacaggtcgattagcttggcgatgggttggttgacgtgggacaccatcatattgaaagcgatcagttggcctatggtgagctccagagcgatcaccatgttggcacccagccagatgatcccgacgccggtcgtcttctgtagcagcataaccccgtggctgatgaagctgttgagggtttgagtgcggaaaccagcttcgaccatgtttgcggtttgggattcccagcgccgttgcatcttgggttctaccgccaggctcttaatggtttcagcgccgctgacggactcgttcaggaatgaggtattgagggccgccgtttggaactgttgttcgatgcgctgttgcagtggtttggagctcagccaagctaacagaaaatagaggggcaataccgccagtactacacaggttagggacggcgacagccaggccatgacgccgaagaagacaaaggtggaggcgaggtccacgctcagggttagcatggagccggtcaggaagtcacgaatgctatcgagctcctgcactcgggtgatgatagcgcccacctgacggtgcttgaagtaaagcaggggcaggccgagtaggtgccggaacagcttgatccctagggtgatatcgatgcggttggcggtgtgggcaaaaaggtattcgcgtagcccccggagcaccacctcgaacagcccaaccaccaccagtactatcaccaatacctctagggtcgacaacgccttgtgcaccaacactttgtccattaccacttggaaaaacagaggggtgactagggcaagtagttgaagcatcagggaaaaaagcagcacctcgccgaggaggtggcgatggcggataaacgcgggtataaaccaagaaacatcgaacctgagggaagcttcccctaaccggatcacctccccgctccatctggcttctagctcgttgatggaaagtacttcgggtgaaacggcataaggagactggatcagggcctgatcagtggaaaggcgcgctaatacaataaatcctccctgtttgtcgcgaaaggccagaggcagtagcttgggagtcagtttggggaattttaaacggcataatgccagatcaacatcatgtgccttgccgtactcttttatcgcaggtttcagtttgttatgggagagcagaggctgtggttcctgagcttcacctttagctaattgcaacaataatcgacaacagttaagcgcagatgacaatgtatctgcatcggcggatatattttccctattcattgtaattttcccttacgtgattccgttctcacgttgttaacataaaaaagcctttccgcaacaaaatgatgtattgcagagtcaattaataataatctgtattaagagcataggctttaattcgaatatatgtcattttcataggtgggtgcaagctaaagataataaaatggcagtcaattaatcaatattatcctaaaaatgttaattggtcattgctaattggttattgctaattggttgttgctaatttttcgttattaatcggggcgtggtattcagtatctgaatatattggattgaagtcaggtatatccatttttattttttttgtggcggatgaaaagccagagttcataagcatagcaccgtcgttgggctgggaacgggtcatgcccaatacttatcttgagctgattgcgataccgggtaaccattttagtttattggaggataatgagaataaaaccgctttggctcaggcgttgaatagagtgctggcaattagttttgaaagggcggtggcgtgatactaataagtaaggaatattggatagtttaaataacagaattgatgatttccatatatacccgttattcttcaagttgcctctttgttggctgcgctcgctcaccccggtcacatcgttatctatgctcccggggattcactcccttgccgtcgcgatgcatcttgaaatccattgggtataggttatttagtcaagtttttgctattgttattggaatttaatctaatctggctttatttttttatgaattttcgttgctatatataaaaatatgtttcattgttattctcatgaatggttaagaataattaatgtaaattttgaagatagccatatactttccattgttaatattgaccaatataatgtctatatatttctctgctgtctggaaatcaaacaaaataaaactataaattaataaatgtctcagggcattacgtaaattactttgtagaacgatttacttgggtgatattgacttgtaattaatgatttatttcatatgttattgttttataacaataatgtttattatgagatagtgtgtaataaagccatttctagttttaaattgtttctttatggtattaaacataatcacatttatatcggcttgataatcttattattataaaaaaatataatggatttaatttgaatttgtattgattcgtttacggtatttacattaacgatattatttatttgttgaaaaatagtgtgttatgaattacttttaacccaggcttatattttcaaataattgaatatatagagtggcttgtaaatgttgaataagttataccctatggatttcaagatggatcgcgacggcaagggagtgaatccccgggagcatagataactatgtgaccggggtgagtgagtgcagccaacaaagaggcaacttgaaagatgacgggtatacatttgtaattgaactattagttgattattaagataaagaatttattttataaataattatcaaagtaaacttttttataattgaggggtgatttattcgttttatctttgtaaatgtctaatttttttgaaataatttcaattagatattaataggaaatagataaaatacagtggtgatttggtatttatgcataattaaatgcagttaacggttccattttaaatgatggaattcaatattagccaattaaaattgcagtcaattaatcgaacttatctaaaaaatggaatgtcttattccgcagcataaaataaattatttattccgttgtcaggagaattaatgtcaggaaattgttaattgactgttattgacggggctatagcatcccgtgcctgaatatcttgcattgatatcagatctgtccgtttttatttcttgggggcaagaagtgagaaagaaatattggtgatggttgtcagaaatgacagttttcaaatttctaacagattcgttgaggtagtaaatgaaagatagcatcgctcaagcaggaagtgattttaaagctgaactcctctctcagacgtcagaaaatataaccaacgtaaatgacattttaccatcgactcagaatgtaaagaatattccccagacgttgacatccagtgaatcattttggtacgaacgtcttgctgctttgcaacccctccaattaccttttgaaaccgctggagagcaagcggaacctagttgggtaataagcgactggcagctcccattgccaaaaaacggtgaagaggaaccattacaaacattgttgcaggcgttcgttatctaccttgcgcgtttgactcagcagactacatttcaaattggttggtgtgtggatggagtaaacgataagtcggcagatttggcaccggtggtgccaatggtcgttgagctggagtttgataagccctggcatgtggtagcgaactggctggatggcgagctgtctcggttgacccggcactgcacatttagtcgaaatctcctcgcgcacgctcctgcattgtgggctattccggcgttgacaacccaccagccgtggcgaattgccgttgctgtcatagcggaggatagaccgtgtgatcagacggcaccgggcgaattgctgacgctccaactcaatgcgcagggcggttttcgctggatttacgatgaaaatcgcttgagcacggaagtgattctgcgcatgagtgaacatttacagatgctggcagcgtcaaaaaagcagggagaggaaattcctatctggcagcttaatgtgttatctgaggctgaacgaaccttactactggaaacgtggaacgccacggaaaccccttatcctgacccgttatgtattcatcaattgtttgaacaacaggcagaacaagccccgcacgccacggcgttggaatatcaagaacagaccctcagttatgcggaattgaatactcgtgctaaccggttggctcatcaattgattgcgctgggcgtcataccagaccggcgggtagcgatttgtgtagaacgctccccgatgatggtggtgtcattgctggcggtgctgaaagccggtggggcttatgtgccgttggattcaacttatccgcgggaacgtctgacatatatcctgagcgatagtgcgccgtcagtggtgctggttgatgaggctggccgggcggcgctgggtgaacaggcgctggtaggcgtgacggtacttgatccgaatatccaacttgaccagcccgacagcaatccgcaaattccggcgttaacgccacagcatctggcctatgtaatttacacctccggctcaaccgggcagccgaaaggggtgatggtggaacatcaggcgatttatcaacgttatctgggttttaatgacacctatgctgtcacctcacaagaccggctattgcaatttgccgcgtttgcgtttgatgtttcagtggaggatttcttttcgtcattatgcaatggtgccacactggttatccgggatgatagctggctggcttcgataccagaatttgttgccttaacccggcaatatcgtattacggtgatgtcactgccgaccttattctggtctgaactggcggctagagataatggattaccgctgccggattgtctccggctcatcatcattgggggtgaggcggtgaaaaagagcgccattcaggactggtttagacaggcaggtcaccggccccggctgttgaatggttatggcccgacggaaaacaccgtgacggtgacctataaggatgtgttatccccggaggatgcccgttctatcggcagaccggctaaaaatgcccgtatctacctgttggacaaatatggcgaattggtccccgcaggctgcgtgggagagatgtatattggtggcgtgggggtggcacgaggttatctgaaccggccggcgttgagcgtggaacgttttatgctggatacttttagtccggtatccggcgaacggatgtatcgctctggggatttggcccgttatttgccggacggtgatctcgaattcttgggccgtaacgatgagcaagtgaaaatccgtggttttcggattgaactgggggaaattgaaacccgactgacggaacacccggcggtacaagaggcggcggtgttggcactggatggcgatcagggcaaacggctggtggcttatgtggaggcgaaggcgaatgagggattggctgttgatttgcgtgaatacctgagtgccattttgcctgactatatggtaccggcggcctttgtgcgtctggataccttcccgcagaccccaagtggtaagttagatcgtcgggcgttgcctgcgcccggggaaaacgattttgcccgtcagatttatgaagccccacaagggaaggctgagatcactctggcggacatctggcgtgagttattgggcattgaacaaatcagccgacatgacagtttctttgcgttgggtggtcattccctactcggcgtgcagatgattgagcgtttgcgccacctaggtttaacactgacggcgcgtgatctgttccagtcgccggtgctgtcagcattggcgcaaacgttgggacagcatcaggctgtgatagtcccgcctaacgccatcacgccgacaaccacggcactgacgccggagatgttgccgctgattgatgtgagtcaaactgatattgaccgcatcgtcgagcaagtaccgggtgggataaccaatattcaggatatttatgcgttgtcgccgttgcaggacggtatcctgttccaccacctgttggaacaggaaggcgacccctatctggtgctctatccggtggcttttgctaaccgctctttactggatcgttatctggcggcggtacaacaggcggttgatcgccatgacattttgcggacggcgtttatttggcaaggattatccgttccggcgcaggtggtctggcgtcaggcacggttgcctgtgacagaactgacgctagacccggcggacggtccagtcattgaccagttaacccggcgttttgatcccgctcagtatcgtcttgacttgagtcaggcgccgctattgcattttgttattgctcaggaaaccgatggccgctggtttttactggaattgcagcatcacttgattggcgaccatgaaacgatggaagtgatgcaccgtgaagtgcaggcctatttttccgggcaaggggatcgcctgcctgcgccagtgccgttccgtcatctggtggctgaagctcggcttggggtgagccaggaagcgcatacccgtttcttcactgatatgttggcggcagtggatgagccaacgttgccgttcgggctgacgggcgtgcatcgtgatggatctcagaagaccgaatctcaccggatgttggttcctgagctaaataaccgtctgcgtagtcaggcccggcgtttgggcgtcagtctggcggcgttgtgtcatctggcttgggcgcaggtattatcgcgcaccagcgggcaggagaaagtggtgtttggtaccgtcctgtttgggcgcatggccgtaggggaagggatggggttgtttatcaataccctgccgctgcggctggatatcgatgagaccccagtacgagacagtgtgcgggaggtgcatctgcgactggctgagttgctggagcatgagcatgctccgttggcgctggctcaacgatgcagtggggttgacagcggtacgccactctttagtgccctgttgaactatcgccataatgagcagccagattctttggatgaaacgatggccgggattgaattcttgggcgaacaggagcgaactaactatccgtttgtgctgtcggtggaggacggtggttctacgctgggtctgactgctcaagtcgtgcagccgtttgatccggacagcctctgcggttatatgcaacaggcattggagagtctggtggaagcgctggagcaagccccagaaatgcccgttcgggtattggacatcctgccggaagcggagcgtaccttgttgctggaaacttggaacgcgacggaaaccgtctatcctgatcagttatgtctccatcagttgtttgaacaacaggtggagaaaactccagcggcgacggcgctgatagcaggcgataaaatgttaagctatacggaactgaatacccgtgctaactggctggctcatcagttaatcgaacaaggagtttgttccggtgatcatattgcgctcctgttagagcgctcgatagcactggtggtggctcagttggccattcttaaagtcggtgccgtttacgtgccggttgatcccagtatgccggatgagcggaaaaactggctgataagtgattgttccgcccggttgctgctcaccgatacacaggctgatattccggctaacctgacggttccgctgttgcgtctctcggatcaatcagacacggacggaagagaggaagagtgcttcaaccctgatttgccgcgttccagcgccgagttagcatatatcatgtacacctccggttctaccggtacacctaaaggggtcttggtaccgcatcgtgcggtggtccggctggtcatcaataatgattatgctgaagtcggaccggatgaccgggtggcctttacggctaatccggcttttgatgccagtacatttgaagtgtgggcaccgttgctcagcggtggggcgttagtggttattgaccgcgccacgttattaacaccacaggagttagtactggttttacaggctcaccacatcacagtgctgtggctaactatcgggttatttaaccgactggcaccagagttatctccggttctgccgcagataaagatcctgattttcgggggagatatacccgacttacaggtgattgctcaggttctaaataatcgcccgccccaacaactcttgcaggcttatggccccagtgagggaaccacgtttaccaccatgtatcctatcgtggcattaacgcagggagtgacgcggatccccattggccgaccgatagccaatacacgtatttatctgttgaatgcttacggccagccagtaccgttgggggtgaccggagagatttatgtgggcggagacggggtggcttgtggttatcttaatcgccctgaccagactgctgaacgtttcctgacagatccatttagtgatcaaccggatgcgcgtatgtaccggaccggggatttggcccgttatctgccggatggcaatctggaatttctgggccgtaatgaccaacaggttaaaattcgcggtttccgcattgaaccgggggaaattgaggcgcgtctggtggaacatccggcggtgcgtgaggcggctgtgttggcgctgggtgatgggtcggacaaacggctggtggcctatgtggcggcggaagcccatgaggggttggcgatgactctgcgtgatcacctgagtgccattttacctgattatatggtgccgtcagcttttgtgcgtctggaggctttcccgttaaccccgaacggtaagctggatcgccgggcgttaccggcaccggacgaagaggcgtttgcccgtcaggtttatgttgcgccacaaggcgagatggaaattgcgctggcgacgatttggcgtgaattactggggattgaacaggtcagtcggtatgacagcttttttgcgttgggcggccactcgttgctggctgtgcggatggttgaacatctgcgtcacttggggttgacgctggctgtgcgtgatttgttccagtcgccagtgttacttgaattggcgcaaacattggggcagcacccggttatggtggtgccacccaatgtgattacgtcagcgacgacgaaaatcaccccagaaatgttgccgctgattgatctgactcaagctgagattgaccgtatcgtcgggcaggtgccgggtgggataactaatattcaagatatctatgccctgtcaccgttgcaggacggcattttgttccaccatttattggcaaacgaaggtgatccgtatctggtggtcagtcaaatggcttttgctgaccggtctctgctagatcgttatttggcggcagtgcaacaggtgattgatcgccacgatattctgcgcactgcctttatctggcaagggttgtcagtaccggcacaggtagtctggcgtcaggcatccttgtcggtgactgagctggcgctgaacccggttgatggcccggttagcgatcaactggctcgacgttttaatccccgccattatcgtctcgatttgggtcaagcaccgctgttacgttttgtggtggcgcaggagaccgatggccgctggttcttactggaattgcaacatcacctgattggtgaccataccacaatgaaagtgatgaaccgtgaagtgcaggcataccttgccggacaagggaatagcctgcctgacccagctcctttccgcaatctggtggcgcaggcccggttaggaggggatcaggaagcgcatacccgtttctttaccgagatgttggcggaagtggatgagccaacgctgccgtttgggctgacggatgtgcatcgtgatggttctcaggagatagcatcccatcggctgctgacggccagcttgaatcaccgtctgcgtagtcaggcccggcgtttgggagtcagtctggcggcgttgtgtcatctggcttgggcacaggtattgtcgtgtaccagtggtcaggagaaagtggtgtttggcacagtactatttgggcgtatggcggcgggagaaggggctgacaatggtatggggctgtttatcaataccttgccgttacggttggatatggatgatacgccagtacgcgatagtgtacaggccgtacatacccggctggcgggattgttggaacatgagcatgcttcactggcgttggctcagcgatgcagtggagttgccagcggtacgccactttttagtgctttaatgaactatcgacataatgatcagcgtgatcctttggatgaaacgatagacgggattgaattcctgggcgaacaggagagcactaactatccctttggcatgtcggtggaggacgatggtgccacgttggggctgatcgctcatgtggtgcaaccgtttgatccggaaagcttgtgcagttatatgcagcaggcgctggagagtttggtagaggcccttgagcaggctccagagacaccggtacgaacactgaatatcttgcctgaaacggaacgcaccttgttactggaaacatggaatgccacggagagcccgtatcctgaggcgttatgtattcatcaattgtttgagcaacaggtggagaaaacccctgatgcgacggcgctggtgtatcaagagcagacgctgagttatgccgaattaaatgcctgcgccaatcgccttgctcatcaactgattgcgtttggcgtaacaccggatcagccggtagccatttgcgtggctcgctccccgactatggtggtggcattgttggcggtgctgaaagccggtggggcctatgtgccgctggacccaacttacccgggggagcgtctgacgtatatcctgaatgataccgccccatcagtggtattggctgatgcgaccggacaggctgcactgggcgacgaggcgctggtcgggttgacggtactcgacccgaatatccagcctgacctgccggatagtaacccgcaggtcccggcgttgacgccacagcacttggcttacgtcatttatacctccggttcaaccgggcagccgaaaggggtgatggtagaacatcaggcggtctatcaacgttatctgggtgttaatgaacgctatgccgtcaccgagcaagaccgggtgttgcaatttgccgcttttgcgtttgatgtttcagtggaagagtgcttctcgtcattatgtaacggagccgcgctagttattcgcgacgatagctggctggcttcaatggcggaatttattgccttagcccggcaaaaccgtatcacggtgatgtttttgccgactctgttctggtctgaactggcggccagagataacgggttgccgctgccggatggtctcaggctgatcatcattggcagtgaggcggtcaaaaagaacgccattcaggattggtttaggcaggaaacctaccaactccggctattgaacgcgtatggcccgacggaaaataccgtgacggcgacctgtaaagaaatattatccccggcagatgatcgttctatcggtcggccgattaggaatactcgcgtctacttactggatagaaacaggcaacccgtgccattgggctgcgttggtgaaatgtatattggtggcgtgggggtggcacggggttatctgaaccggctggcattgagtgaggaacgttttataccggacgtctttaatccggtgcccgacgctcggatgtatcgcaccggagatttagctcgctatctgctggacggtgaattggaattcctgggtcgtaacgaccaacaggttaaaattcgcggcttccgggttgagctaggggaaattgaaacccggctggtggaatatccagcagtacaagaggcggcggtactggcgctggatgacgggcaggacaaacggctggtcgcctatgtggtggcggaagcgaatgagggtttggctgcccgtttgcgtgaatacctgagtgcagttttacctgactatatgataccggtggcctttgtacgtctggatagctttccgcagacgccgaatggcaagctagatcgccgagcgttgccggcaccgggggaagcggcgtttgcccgtcaggtttatgaagccccgcaagggaagatagaaacgatgttagcggctgtctggtgtgaattactgggcgttgagcagattagtcgatatgacagcttctttgcgttgggcggccattcactgcttgccgtgcgcatgattgaacgattgcggcgtatcggtctggggatagcggtacaaacactgttccaacatccaacactctgtgttctggcgcagtctctggttcagcatgatgaaatccgggtgcctgacaaccgtattacaccggatacgacggtactgacaccggcgatgttgccgctgatcgatttaactcagcctgacattgatcgtatcgtcggacaagtcccgggcgggatggcgaatattcaggatatctacgcgctgtcaccgttgcaggatggcattttgttccaccatctgctggagaatgaaggtgatacctatctgttaattagccagatggtttttgctgaccgggtgctgttggatcgttatttggcggcgattcaacggataattgatcgacacgatattctgcgtaccgcctttatttggcaaggattgtcagtgccgacgcaggtggtctggcgtcaggccccattgtcagtgacggaactgacactgaacccggctgatggctcagtcagtgaccagttaacccggcgttttgatccgcgttattatcgtcttgacctgagtcaagccccgttactgcgttttgttatcgcgcaggaaacggatggtcgttggttgttactggaactgcatcatcacttgatcggtgaccatgaaacgatggaagtgatgcaccgcgaagttcaggcgtatctgatgggtgaggaagagagcttgccggtgccggttcctttccgcaatttggtggcgcaggcccggctgggtatcagtcaggaagagcatacccgcttctttaccgagatgctggcggaggtggatgaacccacgttgccgtttggattgacggaggtacatcgtgacggttcgcaggtgacggagttccaccggatgctgacgagcacgttgaatgaccgtttgcgtagtcaggctcgacgtttgggtgtcagtctggcggcgctgtgtcatctggcttgggcacaggtattgtcttgtaccagtggtcagcagagtgtcgtgtttgggacggtgctgtttgggcgtatgcaggcgggggagggtgttgacaatggcatggggttgtttatcaataccttgccgttgcggctggatatcgatgagactccggtacgggacagcgtacaggccgcccatacccgactcgccggattattggcgcatgagcatgcgtcattggcactggctcagcgttgcagtagggttgccagcggtacgccactctttagtgcgctgttgaattatcggcataatactttgtcggcaacgtcagatgaactgatcagcggtattgaatttcttggtggacaggagcgaaccaactacccattcgtgctgtcggtggaggattttggcgaatctctggggctgacggctcaggtcgtgcaaccgtttgatccggaaagcctatgcgcttatatgcaacaggcgctggagagtctggtagaagctttggagcaaacgccggagacaccgatacgggccttgaatatcctacccgaaacggaacgcacgctgttactggaaacctggaacgccacggaaaccgtctatcctgatgcgctatgtattcatcaattgtttgagcagcaagtggagagaaccccagaggcgacggcgttgatagcgggcgataaaaccctaagttatatggaactgaatacgtgtgctaaccggttggcttatcagctaatcgaacaggggattcgtccggatgaccatgttgcgctcctgttagaacgatcgatagaactggtggtggcccaattggctattctcaaagctggcgctgtttacgtgccggttgatcccagtatgccggatgagcggaaacattggctgataagtgattgttccgctcggttgctgctcactgatacacgggctgatattccggctaacttgactattccgctgttgcgtctctcggataagaaaagtgcgaacagagagcaagatcatgtcaaccctaatttgccgcgttccagcgccgaattagcgtatatcatgtacacctccggctctaccggcacacccaaaggggttttggtacaacatcgtgcgatggtccggctggtcatcaataatggctatgccaacatcggaccggaggatcgggttgcctttaccgctaatccggctttcgatgccagcacgtttgaagtttgggcaccattgcttaatggtggtgctttagtcgttatcgaccgcgccaccttattgacaccgcaggagttagtgctgactttacaggagcaccgcatcacagtgctgtggctgacgatcgggttgtttaaccggctggcagcagagttatctcccattcttccgcaaattaagattctgattttcgggggagatatacccgatttaaaggtgattgctcaggttctggataatcgtccgccacaacaactcttgcaagcctatggtccgagtgaaggaaccacctttaccaccatgtatcctatcgaggcgttaccgcaaggagtgagccggatacctattggccgcccaatagcgaatacgcgtgtttatctgctggatgtttatggtcagccggtaccgccaggggtgatcggggagatttatgtcggtggtgatggggtcgcccaaggttatcttaatcgccctgagttaaccgccgaacgtttcctcgtcgatccattcagtgatgacccggatgcccgcatgtaccgaaccggggatttggctcgctatttaccggacggtaatctggagttcatggggcgtaatgaccagcaggttaaaatccggggcttccggattgaaccgggggaaattgaggcgcgtctggtagagcacccggcggtgcgtgaagcggcggtgttggcgttaggtgatgggccagacaaacggctggtggcttatgtggtggcactcgcggatgacgggctggtgaatagtttgcgtgcttacctgagtaaaattctgcctgattatatggtgccgtcagcttttgtgcgtctggatgcgtttccgttgacgccgaacggtaagctagatcgtcgggcgctaccggctccggacagtgaagcgtttgcccgtcaggtttacgtggcgccacaaggcgaaacggaaatgacgctagcggcgatttggtgtgaattactggggattgaacaggttagtcgatatgacagcttctttgcgttaggcggccattcactgctcgctgtacgcatgattgaacgcttgcgtcatttgggattgacattggcggcgcgtgatctgttccagtcgccggtgctgtcagatttggcccaaacgttggggcagcatcaggccgtcatcgtgccgactaacgtcatcaccccggcaaccacggcattgacaccggaaatgttgccgctgattgatctaactcagccagagattgaccgcatcgttgggcaaatgctgggcggtgttgccaatattcaggatatctatgccttgtcgccattgcaggacggtattttgttccatcacctattggcaaacaaaggggacccctatctattaaccggtcagatggtcttcactgagcggactttgctgggccgttatctggcggcggtgcaacaggtggtaaatagacacgatatcctgcgtactgcctttatctggcaagggctgtcagtgcccgcccaagtagtttggcgtcaggcatccttgtcggtgactgaattgacactgaacccagccgatggaccggttagcggacaattggctgagcgttttgatccccgtcaccatcgtctagacttgggcgaagcaccgttattgcgctttatagtggcacaggagactgatggccgttggattgtattgcaattgttgcatcatctgattggcgaccataccacgttggacgtgatgaaccgtgaagtacaggcttatctagacggacaggaggagagcctgccaacaccgacacctttccgcaatttggtcgcgcaggcccggctgggggtgagtcaggatgcacatatccgcttctttaccgaaatgctggcggaggtggatgaacctacattgccgttcggattgacggaggtgcatcgtgatggctcccaagtgacggaatcgcagcgaatgttggcacctgagttgaatgaccgtctacgcagtcaagcccggcgtttgggggtcagtttggcggctttatgtcatttggcttgggcgcaggtgttgtcgcgtaccagcggacaggaacaggtggtgttcggtaccgtaatatttgggcgcatggcggtagggaaaggggttgacagcggcatggggctgtttatcaataccttgccgttgcggctggatatggatgatacgccggtgcgagatagtgtacaggcagtacatcgtcagttagcgggattgttggaacatgagcatgcctcactggcgctggcccaacgttgtagtggtgtgcaggatggcattccactgtttagtgccctgttgaactaccgacataatgatcagccagatcctttggatgaaacgatggacggcattgaattccttggtgcgcaggagtttaccaactatccgtttgccttgtcggtggaggattttagtgacgcactggggctaactgctcaagttatccaaccgtttgagccggaacgggtatgcggctatatgcaacaggcattggagagcttggtggaggcattggaacagaccccggaaacgccggtacggacattgaacatcctacctgaaattgaaagtacgttgatgctgaaaacgtggaatgcgacggaaacctcgtatcttgaaccgtcgttatgtattcatcaattgtttgaacaacaggtggagcaaaccccggacgcaacagcgttagtgtatgaggagcaaacttttagttatgccgaattaaatgcccgcgctaaccggctggcccatcagctcattgcgctaggtgtagaaccggaccagcgggtggcgatttgcgtggcacgttcaccggcgatggtggtgggattgttggcggtgctgaaagctggcgcggcttatgtgccgttagatccggattatccgggcgaacgtctaacgcatattttggctgatgtttcaccggttattttattggctgatgctgtcgggcgtacagtgttgggcgagaatgtacttaccgggctgacagtgtttgatccgaatacattgtttgaccagccagacagcaatcttcagatacctgaactgacctcacggcatctggcgtatgtgatttacacctccggttcgactggcacaccaaagggcgtaatggttgaacatagacaattggtcagtcaaattacttcgctgaacacgaagtggtcgcttaacgcatctgaccgtctattgcaattttgcaacccttcttttgacgtttgtgcatcagaaatattttgcgcaataacacagggggcacaattagtcttaaggacaaatcagtggctcttgagtgcgcaggcgttttggcgtctgtgcgagtcttataaaattacctacattgcgataccggcccaattctggcggataatatcaaatgttgataaaggcgatatctatcagggcctaaggattatttgcattggtggggaagcgatacctgatcatgagttacaacgttggctagcgactcacggtgaataccctgttctggcgaattgctacggtcctacagaagccacgattaccacgacgacatcctgcctaaacgaggggatggggcaggccaatatcataggccgtccgctaccgaatacacgcgtttacctgctcgacgttcaggggcagccagtaccgttaggagtcgagggggaattgtatattgggggcgttggtgtcgcacggggttatttcaatcgtgctgaactgacagcggaatacttcctgactgatccatttagcgataatccaaatgcacggatgtatcgaaccggggatttggttcgctacttgccggatggcaatctggaattcttggggcgtaatgatcatcaggtgaaaattcggggtttccgggttgaaccgggtgaaattgaggcccggttggtggaacatcctgcggtaagtcaatctgtggtgctggcgttgggtgaagggcaggacaaacgcttggtggcttatgtggtggcgcaagcggatgagaggttggcgaatagcctgcgtacccacctgagtgccattttacctgactatatggtgccgtcagcctttgtgcgtctggatgcctttccattgacaccgaacggtaagttggatcgtcgtgcgttaccggagccggacaatgaagcgtttgctcgtcaggcttatgaagcgccacaaggcgaaacggaaatcgtattagccgcgatttggtgtgaattgctagggattgagcaggttagccggcatgacaatttcttcgcgttgggcggccactcactgcttgccatgcgaatgatgaatcttgccgccggtcggggtttgatttttacattgaatgctttgttccaattcccggtgttgtccgaattggcctctaaaatcacctcggatttattgtctcagccgcgaagcagcgctatatcggtgcgacctggcggaacagggctgccattgttctttgttcccagtggcatgggtgactattcttatgtcttcgggctggctcaacatatcccgtcgggctatccgatttatgcgctgccttggccatccatcagtgaagaactgatgttaacgatggaagagcaggcagccagaatgatcaccttgatgaaagcggtacaaccggttggtccgtatcggataagtggctactcttccggcgggatattggcttatgccattgtccagcggcttttgagtgccggtgaaatggttaatttcttggggttaattgatacgcctgcaccgcattattttggcaaagaggccatgcagtctaaacatcatttctttactgagttggctcggcagtcggggaaggcgtgcaaagaagagattgcggcgttgtaccggcgaattgatgagttgaatttggtgcagtttattgaagcagcacaagaattggcgttatatcccgcaaatctgcgtgctgatgtgatcgcaaagcattggcggcagatcgaacgttacacgcaaatagttgcggattatgaaccgtcagcattagcaataacgttgcatcagttctatgcggtagaaccttctcctgctgattcttttgtgacggatgaaaagccggaatccgtaaatatagagccgtcgttaggttgggaacgggtcatgcctaatacttcacttaagttgattgctactccgggtaaccattttagtttattggaggataatgagaataaaatcgctttagcacaggctttgaatagagcgctggcgatcagtggtaatgaggagatgtaatactaatatagttaaggaatattgaataatttaaccttgatatgataatccggtgtgtttcttataccggattatctttcttgtttatcctttttccccaaggtgaaagccgattttcatttttcactgatagatttatgctgggcaggttttaacctgtttttaaaaacattgctttaacctctgattttaatcgttatcaggttttaaccgttgtttttatcacttttaatacctgatttttattcagtttaatcatcatggcatatcgtattttacatttaacaaacattaatcatacccgctttttatctttgctgaggctatttagcctgataatattaaagatacccccttatatttttttcggataatcaacgcactgtttaaaacttaaatcctgccacattaaccgctttatcccttattgcgttatgtttatagcttgctgagtaaaataacagtgagaaaacacattaacaggctgggtaatattattttacctgctgatttattttcaattctctgctaatagttaatggatttttaatacaaacaattaaccgcctttataaaaaaggtctctattgagttaaatccatattttccttttatataagtctttaatctctctgtatactcacttttaaatcatcatagcagggaataaaccttttttattcccgctgagctttttaaaaatcgggcattaatggggtacctactttttaaatcctcagatggattaattaccgataaaaaagcgcttgcaatcgctaaaaacgggaaatacaagtaaaaagagaaagttagccatgttaaaagagtgggatcggtaaaacaattatcactcctggaattttcctgtttttttaaagcaaaagcgggttttcattaagcagtttttatcaacctaatgttttttcgtttcctgatacgtagttaacttccccgtttccattaaactaatgtttaggttttctgttttccataaacgtctttcaatccatgcaacatcgtttattgaagcacattaacttaattgagttaatccggttaaatattttcactcttattattggattaacgcggtcacttggttaatcaactcaggaccggttttgcctgatgctttctcttacaatatcaatatagcagtgaattttttacccgtttttaaaaaaccttaatcatttattttcaactttaatgattaaagtttttacctgttttttcatcatacgctgactattttgtccagatgttaaaacgacactgacagaccataaacggttttttaacgacggttttatcatatgcagataaagcgtctctcacttttacctgaatgagtgaaaatctctgtcacgccttgttttcaaacaagatgaaaaatgacagcccacaatgatttaatctgaacgaatcttaacgttactaagtcaataaaaagcattaaaacgcaatgttaaagacagtaaaaacagcgttaaaaccctgccggtggtagtaaaatgcgataaaaaagagtttaatgtccatgaaaacggtcagtccacattttttcgttttatgattaatgaaaacgcaacagtgataatcgaagcgctaaaagcagatacagcataatgcggtgtttgttgctgccatttaataaaattcggatgttgggtgaacgtagcggagtaaaaaaatttgggatttatgtcacatttattaagttaatcaaatactcatcacccaaacaggcgggacaacataagttttttgttatatgttcttgattagatattaaacacataaaacgactgattagctatcttcacgatactcttaagccgcaatggaatattcccgacgttgcctgttcatacaggttatcaataagactatcagcgacaaactgctggtgcctttatagctttatagatagttctgacgagacttgcaaatgataagggaagcaagatgccattccaaaaaaaaccatgcaggcgatttagcaccggacaaatcgctgaccgcctgaatgctcagcgtgtcggcaggctaacgtgcaacatgcccccatcccagctaaaacagatactcaccatgatgacctcatttcatcctcgtctgagtaatgagccataatgtccgggaggggtcatgagcgtattaatgatggcctggctgggggccggcgctgcgctgcgcacaaccagaacagagacgacctcagcagggaatgctccgccgccgaccgaaatcagctcttctgccgatacggtgctaaattatctggaaagtgagcgttttcagtatcattcgctggcggcagcaatgacgtataccgttgcgatgggcggtgcccccgccgtcctcccgctggtcgcaggagtagccgccgggaagttgggagttcagataggcaatgatatcggcgaaagccttacgcatggcgtgatggttttttttggccggcgtacggtcgccaccgaaggccaggccccggcccggctcggggatgcgattgcccaccagaacaaaagcgccggcttatggggagcgctgggcggcgtgttgctcggcgcgctggcggcggtggccgtcggcgggttaattgtggcaaccggcggtctggcgatggccgtagtcgccggggcggcggccggcctggcgggcggttttgtcggcggactggtctcatccgtgggcgcggcactcgggcagtacggggcgaataagggccagattgtcgaagggtcgccagatgtcttctttgaaggccagccggtggcccgtcagggggacaaaattgtgtgcagcgaccaccccggcccggtggtgattgccgaaggcgcgaaaacggtgtttgccaacggcaaaccgattgcccggctgggccaccgcaccacctgtgacgccaatatcaacagtgccgccgcctcgattgccctcaccccgcaaaccggtgacgccctgactatcctgaccgccagcaaccaggacctgcgctggctggtcgccattgccggcctgctcccgctaccgcttggccggaaaagcaacggcggcaaagccaaatccggggcggaacccaccccgtcggtgaaaaaaaccggcggtgacagccagctctgtagcaaagccggcgagccggtggatgtggcgaccggcgacttcttacaggtctggccggtgctggccctgccgggagtcttgccgctgaccctgaaccggacttaccgctccaccgccgccctgtccgggctgttcggccccaaatgggccgatgactggtcgcagcacctgcgccgcgacggcgaggaaacccatttcaccgatggcgaaggggtgatttacaccttccataccccgaaggaaaacgtcttctcggtcaacctccatgccggtcattacctgctgtacggccggcgcgacggcgaactgcgcctgttcaaccgccgcacccggcagatactgagttttgccgcggtccagggcgataaacgccgcctgtccacgatagaggaccgcaacggcaatcagaccgtctttcgttacgatgaacaccaccgcctgacccgcctcgtccatgccgacatgacgaccctggcgctgcattacgagcaccagcagctcacggccattgactggctgcacgccggacagcgccagcggctggtgacctgccgctatgataatccggggtatctggcggaatgtgacacctttcagtttcaccacctgtggcatgaatacacgccgcaggggaacatgacccgctggcatgacaccgataaaaccgatgtcactgtgcactacgataacgcgggccgggtgacggccaccaccaccccgcagggatactggcaggaccgttttgaatacgatgacgaacgccgcgtcaccacctatttcgatgccgaaggcggctgtacccgctatcactataacgccgacggcctggtgacccgccaggttgacccgctcggccatgacacccggactgaatgggatttcagtcacaaagtcgccgaaaccgacccgctgggccggaccacggcgtatgagtacagcccttacggcgagctgaccggcgtcatgtcatccaccggggacctcactgcttacgattacgacgaatacggccagcttacccgggtcactcaaccggatggtgcccgctggcaactgcattacagcgaacagggcaacctggcctcggttatcgacccccaggggcgggttgaagagacccgttacggcccgcgcggggaaatcctgcgccgggtcttgcccgatggccgcacctggcgctacggctatgaacggcaacagctcagtgaaattcaggccccggacggtgccctgacccggtttgacaccgacggcctgggccggctgctgcgggtcaccgacgcgttacatcagcagacccactaccaccccagcccgtttcatgccaacccggcgggcagtatcagcgagattggcttaccggacggcatccggcagacgattgactacgacagcgaacgccgggtctcggcggtgactgacggggaaggccggaccacccgctatacctatgacgcctttgaccggctcagccgcctcacccgcccggacggcaccgccctgacctttggctacgaccggctgacccgcctgaaaaccgtgaccagcgaaaccggcgacacctaccactacacccgtgacccggccggccgggtgattagcgaaaccgattttaccggccggaccattcattatcagtatgacgccgccgggcgtcgcctcaccgcccgttatcccaatcaccagctgctgcgctggtgttacaccgacgacgaccgcctgacccgccaggaagcgtggcaggaagaggccgaacagtgcacgttatgctcggtcaccacctacgaccatgacgcgcagggacggctgatacgggccaccaacccggacgcggtggtgacgtttgcatatgatgaatccggccgcctgaccaaagagacaattaacggacgcgccgtcagccatcagtgggacccgcgaagcggcctgcccgccggccgccagatggacaccctgcccgcggtcagctggtactacggcctcaacggccggctgatgcagtggcagctggacggccatgccccgttgcagatgcagcatgacgggctgggccgggaaatcgcgcgggaaagcgctgccggctttatccagtcacaggcctacaccccggtcgggctgctggcccatcagaccgccgggcgcagctccgactggttcaaacagaccctgtacgaggccgacccgcatttcccgccgcgcggcagcgcggtgacccgccactggcattacaccccggcctacaacgtggcctgcattgaagacacccgctgggacgagacgcgctacggctacaatgtcaacgaccaggtggtgaccacccagtttggcgggccgcgggcctgtgacgaacagtttgtatacgatgccggccagcacctgcattaccaaaaacgggtaccggaacggctcagtgaagacctgcgccagagctaccacacccagcaggcggggagggtgattcagcacggtgcctgcacgtatcgctacgatgaaaacgggcgacggacagagaaaaccgaacggcggtggggctaccggccgcggacctggcgctaccgctgggatgcgcacgaccggctgaccggctttatcagcccggaaggggtgcgctggcgttattgctatgatgccttcgggcgacggattggcaaacgacaggaggtggacgccgccggaccgccggtgaaaccaaccgcgataatcggctatgattacctgtggagcggcgagcaactgatcgaagaaacgccggtgtatgcggatggcaccgttgactatgaacagagcattcactggctgtatgagccgggtgccctgacgcctttggcccggtttgaaaaaggccagctgtactatgtggtgagtgatcatcaagggaccgtacgggaaatcctgaccgaagccggggagctgatatgggcaggacgactgctcacctggggcgagccggaatgctggccggtgctgacggtcaatgacccgcgcaacctgacgtgtaatttccggtttgctggtcagtatgaagacagggaaagcggtttattttataatcggcaccgttattacgagagtgatacgggccagtacttatcgcctgatcctctgaatcttagtggtggcgttaacccgtacgggtatgtccatgatccggtcaattggatagacccgttcgggttggcagcttgtccaacacaaaaatatgaagttagtacattcgatgatttacagagacgttctaaggtgggtgataaattagatatccaccatacggctcaaaaacatcctgcggggcaagtaattactggttatgatcctaaagtagctccatcaatagctctccctagaggagaacataaactgattcctacaatgaaaggaccttatacgggatcggctagagatttattggcaaaagatattagagacttgcgcaattatactaatgctcctccttcagcaataaaagatttgcacaatttaaataaagaaatgtatccagaagccttcactaaaataaggtaataagatgaattctcaactatttgtagatatattaaagcttgtagtaagagatgctgctatcgaagacactatctcaatacttgaatctcccccaggtagaaaaccacaaagagaactaattgaactatctgatttttataatgaaaaatcgaaggaagagaaagagataatcaataaaataataagaatagtagctgataatacattgttcggtattctttgtgttattgatggtgtacgtgcaatagaaaatgatgaaaataaaggtgagctaatattgacctataaaaaggaaagtatagttaacttaaataaaaatagtaatctgcacgatatatataatgctagttaattaataaagccggaagatccccgagatcttccggctttattatgatctaccttggtgcatatccacagtaaaccaacgcagattggagcttagagatcgcatctttgatctgatacgcttcctcgtcattcacggcacaggcacgtatctccgccccgtccgcccccgcgggcgggggctccccgctgaaaagtttcacctgcgggcctggcccgcccgcacccggccaacccgcgtcagcggcgcaggcaagctgcaccgccgccacgggttcctgataaaacccggttctggcagaaaaagcggggcgaaacccggcactgacatcggggaaaaagtgagctaaaatcggcaaagtgcacatcggggttttgggttcgcggcggtgagggcagagggacgaagtggctctttaacaggttgttattaaagaaaaaatcccggtcaaaaagtagggtcgtgtcggggcagtccctaagacccgctcgggttagccggatgtccagggactaagaacaagaaaacgacctatgaagggaaaagtcgtcgtggtgcgctacggcaggccaagagagatgcgggaatccttaatagccagcatccatttgagatatccaaagctaaattgaaagatggttatggtgattttattcgtgattccaaaggcgttgcgattgaagcacggcaatatcattttaaagataaaaatggttctacggtaattattcaagaacacagcttagggcacgcaaaagcaacacctttacatggagcagagcctcattttaacgtcaggccacccgataacttgaatacaggtgatgttccgggaactcatggtcactataacttttagggaaataacatgaacattattgaagtcataaataacaaattcttaatttcactttttcctgaaggattaaaagatgacattcttcttggacaagttggactcgatatagcagatcaggtatcactaaatatccatgtaacacaaagaccagaaaaagaagtcgctaaatggggagtatgggggaaagattataatgtcattgttattaaaatcattggtcagtttttgagaaaagttgaaatagttaactggcaaaagatcacttcatccgaattaatttttttagaaaaaggtgatttttactctttcaatctcaaaggagacgagtggagtgtttctttggagttggaagccttaacgttccaacgatgtgatatatatagtaaataatgtttaagccggaaagatctccgtgatcttccggctcttttatctagttcccattcagcacattaaacattccgtctttatagttacgttcataatccgacgggttggatcgatcctttcgggctatcaactgtaatgttccggtgaactcaccttgcgtggtcagataaccacaaaatgggatgttaacggaagggattctcaggccagggcaacagctcattcaaccgattgttcggccagacaggcagccggctgaggacatcacgtaaccagacccagggctcatgtccgttggctttggccgtttccagcaggctcattatcatggccgcccgttgccccgcggccagtgaacccgcaaaaagccagttctttcggccgagcgccacaccccggaccgcattctccgcccggttgttgtctatcggcacccccccgtcatccagataacacaccagcgccgaccagcgcttcagcgtgtaatctatcgctttgcgtaaccccgagttgggggccgtttgggtctgcatcgtttgcaaccaggaccggaactcattcagccacggccgggcataacgctgccgccactgacgccgtttatccggcggccggtgtttgatttttcgctccagcttgtacaggtcacgaatgccatccagcgcctgtttcgccaccggactttggctcgctttgtattggtcaaagaatttgcggcgggcgtgagcccagcaacccgcttcggtgatatccgcccgggcatgcagtgcgttgtaaccggcatagtcatccgtcaccaacgtgccgcccgaccagtctttcagcaggctctgggcataacggccgctgcggccgggatgcagctcatagtataccactgccggcgaggtatcggggccggtgacagacgtccacaggtaagctcgctgggtctggccttttcccggggccagtatcggcaacggggtctcatcggcatgcagcaccggggacgtcagcagcgtctgcttcagggcatcggctaacggttgcaacgccaccgccacctgccccacccagtccgacagggtgctgcgggccagggtgacaccgctgcgggcatagatttgctgctgacggtagagcggcaggtggtcacgatatttagcgaccaccacctgagccagcaaccccggctctggaaggcccttttcaataagatgggcgggctgggctttagcatgcacacactgacagcgcgcgcagctgtactgcgggctgatatagcgccggacgataaacgtggccggacggtattccagtcgctcactgatttcatcacgcaaaaagcgcagggcatgaccgcaatccgggcagctctccgtctccggcgccagccggatatcttcacggggtaaagtcgccggcaaaggctgacgtttaggctgggccggggtcgcgttttccttgatatgcaggcgtgacagccgggtttccagcaccgcgatatcggtatcggcatcttcctcaaactgactgcgtttgggaccggcaggcagggtttcgctgtgcgcgccaaaacgccagcgttgcgcctgtttcagggcctcttccagctggcgaatataatcaccttgttgctgaagcagcgccagtgcccgcaggcggaactggccggggtcatccagcgcgattaagtcattgagcgtcatgccgacagtgtaccggataattccccgtcgttatccggtaaaagtgtgaccggggtagcggaattagtttcgccagccggacaggtcatctccctcgacctgttgccagtgaatgccgcggatgagccagtcaaactgggcgggcgtcatcacccagctgcgctcgccctgcttcggccagacaaaatgggcccggtgcagacggcgggtacacagccagacgccgtgtcggtcccagcgcaacaccttgagacgggagcgggccttgttgcagaaaataaaagcggcttcgtcctgccagcgcaaattcagcccctccaggtgctgggtcagggcatcaatgccccggcgcatgtcgacgggctctcgcaccagaaagagctgttgcggtttcagcatcgggtcagtacccgcatcacgtcaggcaacagcgtcaatggacaggcgatggcatagccgtctggggtatgcagggtgacggtgcgcgcgtcgtcaggctggagtgaaaccggtaagagggcgggcagtgtctggctgagaggttgggggatgttgttactgtcggcaatccagtcgcggaaagcggaaaaactcagctgatgctgttcgcaatactgttttcgggtcaggtcactgtggcgccattgggtcacatggtgttgtttttgttccggggtatatcggctacggctcatggtgtcagtctccaggtgaagataaggaagcggtagcgtgcatgggccggagaggaagaacaaggtgagatgaccggacgtttactatcaactgtcacggttggtcgttggatgagtcccgaagaacttcaaaaaatgcgtgatactggcaaagtagttcaaagtactacgggaacaacacatgttggttatccagcaaatatagatgcctttggtaaacaagctaaaccgggaacagtgtatattgaatttgatgtccctgaaaaatcattgataaaaacaaatgatgaatgggcaaaaatagtaggtccagattctttagaagggcgtttagcaaaacgtaaaggattgcccgtaccagaaatgccagaagtagccaatatagaaattaaggcacagaaaacaacagaggggataatgacagtatgcaaaaaataagactatggattatatctaattacaattatcccgtgattgtaaataatgaaagtttagtagttgatattgatactgataaaagtattgctcggtttactgtatgggatgatttgtcatgcatgttagaaattcttgatgtagatactgaaaaatatatcatcaatgaaagaagagaactggcctctgacaatgaagtaattgaagcattcaaagaatttcatagcctgctaaattaaacttaagccggaaagatccgtgtgatcttccggctttcttgtgatttatcttggcgaatatccacagtaagcaagggcagattgaagcttagagatcgcatctttgatatgatacgcttcctcatcattcacggcacaggcccgtatctcagtaaacgtccggtcatctcaccttgttcttcctccctggcccatgcacgctaccgcttccttatcttcacctggaaactgacaccatgagccgtagccgatataccccggagcaaaaacacaacatgtgacccaatggtgccacagtgacctgactcgaaaacagtattgcgaacagcatcagctgagtttttcctttttacgtgatgaaatcagtgagtgactggaataccgtccggccacgtttatcgtccggcgctatatcagcccgcagtacagctgcgcgcgctgtcagtgtgtgcatgctaaagcccagcccgcccggctgattgaataggttgcattttggattaaataacgtttcgtaattatgctacacatagccttcttcaacccattgttatacatagaattatgagtggtataagatgtagcactattttgaaatcttatttaatatcatgtctattatttaagggaatacgaacatgtttacttccagattaacgatgttgcacttattatgtgaatccaaggtttttaataatttcaattttacattaatataaagaaaataaaatatggcgtgatttaacatttatacataataaatacaaataacgatttcacttttaacaatgaagctcagcgtttgccaatgaaaattgcagaaaattaaatgagatcattaaataaataggagaaaatgaaatttattatttagagtgataaattgatgataaagattatatctgttttttcaatcgcaatcgtaaagcagtactgtatatcaattctttatcaagtcagtaaagtaattagtttaagcttttgaataaggcgttggtaatcggttatgataataatgttttgcaatgctaatatattaataaataattaattgtttagcgatggtgtgatcattcggtatgaattggttatcgggtttttcctatctaaaagcaagattgaggaaagtgataatcgctattgaatcgttttcacttgaaaaggctttacctgtttatctaatctaagtaaatcattgagataggggacaatatggtcaatttgttacaaataatcttatatccgtcatctttcaagttgcctctttgttggctgcattcactcaccccggtcacattgttatctatgctcccggggattcgctcccttgccgtcgcgctccatcttgaaatctataaggtataataagtagggatatcgttgtctgaaatttaagagcatttagatgatagttaattttatattaagttatcatcagattgttcactctttttgttgttttggttatcggtttactcgggtttttgaaagttaaatttggtcaaattttattttacatttgaatagataaatttcaggcgttattaatgaataattatttatctattcgtttcatctatatgtagtagatttaatttattcactgtttatgccctatttattcactaaaatcgcataaattgtgcataaaaatactttttggaattttgaacgggatcaaaaagtattttttttgtgtacaacttgtgttgactttgttaagcgtgggcaacagtatctgtctaatggctgagcaactataccttatggatttcaagatggagcgcgacggcaagggagcgaatccccgggagcatagataacaatgtgaccggggtgagtgagtgcagccaacaaagaggcaacttgaaagatgacgggtatatgttttaggaaatagtcatgggattaataagaataatattaaatagatcctgtaatcttattatttttaaggttttttaggtttcagtttggtaaaccttttactcggcatacattaaataagttgtgtcagtgtgagacgaaagatgatgcggagcatattactttctctcatccgtgtactctctattttaaggggaaatgatctatgttagaaaatattcagagaagttggtttgaacactatatggtgccctgtttctctcctgctaagttcatacctgttcgggccaaaggttcgaaagtatgggatcaagatggcaaggaatatatcgattttgctggtggaattgccgttaattcattagggcatgcacatcctgaattaaaggatgagttaatttatcagattgataaaatatggcatataggtaatggttacactaatgaacctgtcctgaaattagcaaaaagactggtggaaaatacgtttgctgataaagcatttttctgtaattcaggggcggaggctaacgaggcagcattaaagttagccagaaaatatgccgctgataaatatgggaaaaataagaatgagattatttcatttaaagattcttttcatggtagaacattatttaccgttacagtaggagggcagccaaaatattcacaagattatgcccctcttccgcaagaaattacgcatcttccttataataatttatctgcaatcagagaacacatttctgaaaatacctgtgcggttattgtcgaacctattatcggtgagggcggtgttattcccgcagatcctgcattcttgcaggaattacgtaccttatgtgatcgttttcaagcgctgcttatttttgatgaaattcaaactggggtgggccgtacaggatacctttatgcttatcaggaatatggtgttgagcctgatattcttaccagtgctaaaggtctcggtggcggttttcctatcggcgctatgttaacaaaacagcatatcgcagcggtttttcaacctggaacgcatggtaccacgtttggcggtaatcctctggcgacggcagttgccaataaggtgctttctattgttaatcaggcggaactgctcaccggcgttttgcaacgtcatgattacttcatggataaactatcgaaactgaatcagcgttaccaaatattcagttgcttgcgaggtaaagggctgcttttaggtgctgaattggataaagcttggcagggtaaggcgaagcaattaactaacttggcagcagaggaggggttaattgccttgatcgcgggtccagatgtgttgcgctttgcgccagcattaaatattgaatttgctgatattgatgaaggtttggttcgtcttgaaagcgccatcatgcggtttgtcggttaatagtaaattgaaggtgacgttatgatgcttttccgagctgtccggcatagtgacttaaatggggttcagtctttatctcaacgcgctggtataggtttgacatcttttcccaataatctggatcaattacgttcacgcattgcacgtagtgttgatacttttgatggaaaactggccagggctcagcagggattcctttttgtgctggaagataccagcgcgaatcgtgtggcgggtgtcagtgccatcgaagtggcggttggactggaggagccgttttataattttcgggtacaaaaaaccattcgttcatcacgtgaattggggatttataaatctattgaagcgttgactttggagcaagatcagaccggtaacagtgaattgtgtaccttgttccttgatccggaatatcagaagggaagaaatgggacatttctctccaaagcacgttttctttttatcgccgcatttagggatattttttctaaaactatattcgctgaaatgcgaggggtggcagatgagcaaggaaattcccctttctggaattcattgggacaacatttttttggcattcctttttcccaggcagattacttaaccggtattggatcgaaaacctttattgccgaactcatgccccttcatcctatttatatctccttattatctgctgaggcgcagaaggtgattgggcaggttcatgagaaaacagtacccgcgcgggcaattcttgaaaaagaagggcttatctatcaaggccatatcgatatttttgatggcggcgctttattacaggctgagattgatcggatacgtgcggtaaaagagagtcgtctcgtttctgttagtaaagccgaatcagtgaccagagacgatggtgttccttgcatcgttgccaatcagcagtttagtgaatttcgggcgcttttattgaatgtggtgtgtgacagtaatgaactttttttaacagccgcagagatgggtgcacttcaagtcagcgatggggatcaggtgcgactagttagtctctttccaaaggaaaattaagcatgaattataaagcacattacattgggggaagatggattgaagggcagggtgagtcgataactaaattttccccgatagatcaacaggttctgtggcaagctaacagcgccgatgcttcgcaagtcagggccgcttgtcatgctgcgcgcgaggcgttttatgcttggtcacatttgcccgccagtgagcggattaaggtcattcagacatttgcggctttgctgaatgaggagaaagaaacgcttgctcgtgttatcagtcaggaaaccagtaaaccgttatgggaaactcggactgaaatacaatccatgataggtaaggcggctatttctatcgaagcgtgggaacagcgtactggtgagtcagaaacgattatgcctgatggccgtgccttactgcgtcaccgtcctcacggtgtgatggcggtttttggtccgtataactttcccggacatttgcctaatggtcatattattcccgcgcttattgcgggtaatacgctggtgtttaaaccgagtgaattgacaccgatgaccgcagaagagacggtgaaattatgggaaaaagccggtttgcccgctggtgtgctcaatctggttcagggagcacgcagtaccgggacagcattgctggaggataagcagattgatggtgtgctgtttaccgggagtgccaatacgggctttcactttcaccgcatgctcggcggtcagccagagaagatgttggcgcttgaaatggggggaaacaatgcattgatcgtcgatgcttacgacgatattgatgccgctgtttacaccattgtgcaatccgcgtttatctccgctggtcaacgttgcacttgtgcccgcagattgttggtcaaaaatggcgcccatggagatgcggtgattaagcgtttggtggaggtgacagagcggatcgtaccatcccattgggatgcccaaccccaaccgttcattggtggagtcatttctctacaggctgtgcagaatctattggaagctcaagatcgactacaaaaactgggtggtatctctttggtttcgctggagcaatgccagccgcaatcaacgttgttgacccctgggattattgatgttagccaagtcgctgatgttcctgatgaagagtatttcgggccgctgctcatgcttatgcgttatgacacatttgatgaggcgctggcaatcgccaataacacccgattcggattggctaccggtttaatttcgccggatgctgctctgttccaacgtctgtcggaagatgccagagcgggcattgtgaactggaataaaccgttgaccggggcttccagtaaagcgccttttggtggcattggtgcgtcaggaaactaccgacctagtgcttattatgctgctgattactgtgcctggccgatggcatctctggttgctgacgaactcactttacctgaaacgcttgcgccagggcttcatttccctgattaaccgtttaacgggagaggttttcaacttatataatttttccaaggggatttatggctggttttgaagcaaattttgatgggttggtcggcatgacccatcattatgcggggctttctgtgggtaataaggcttcgattaataataaagacagcgtatctaacccgcgtaaggccgcgctgcaagggttgatgaaaatgaaagcgttggctgatgaagggtttattcaaggagtgcttccgccgcaacaacgccctcatattccggccttgcgtaatttaggttttgtcggcagtgatgagcagatattgcataaagcagccaaatattctccggtgttattatcaaaactgagttctgcttcatcaatgtggaccgcaaatgcggcaaccgtgtcaccttcggcggatagcgctgatcagcgagttcatttcacggtagctaatttaaacaataaattgcaccgttcgctggaaatagcaacgacgactgccgcgttaaaagccacttttgctgatcaaaactattttgttcatcatcaggctcttccacaacatgaagattttggtgatgaaggggcggcaaaccataatcgcctcggtggtgattatgattcgccgggcgtacaggtgtttgtctatggccgtagcgtatttcgcggcggcccggtgcctaaacgttatccggcacggcaaacattggaagccagtgaagcgatcgcacggttgcatcggcttaatccggcacaaaccgtttttgtacagcaaaacccggtcgccattgacagtggggttttccataacgatgtgattgcggtcagcaaccgaaatgtcctttttcaccatcaatatgcttatcttaatcagtctcaggttctgaccgaaattagacagaaaatggcggtgttgggacagaattttgtctcgattgaggtgcctgctgagcagatcagcatcaaagatgcggttgattcttatctctttaatagtcagttactgagtaaaattgatgggaaaatggtgctcgttgttcctgaagagtgccgccaacattccgctgtctgggattatttgcagtcgctgagtgcacaaacctctgcacctatcaatgaagttcgtgtttttgatttgcgggaaagtatgcgtaatggcggcggcccggcctgtttgcgtctgagggtggtacttaacgacgctgaatttcgtgcggttaatcccgcaacattgatgaatacgcaactttaccagcgcctgaccaaatggatagagcaccattatcgtgatgaattatgcgccagtgatctggccgatccccaattactttgtgaagtttataccgcgctggatgagcttacgcagatcttgaatttaggatcgatctatgaatttcagcgctaaattggagcagatatggatctgttaacgttattgcttgaaaaaaaacttgccgaccacctgacatttccagaaacaataaatgcgcattggttggctgaaggtgtactgcaattgattccccatgaagagggaaatcggtctctggtgatttctgccggtattcatggtaatgaaaccgcgcctattgaaatattgattcagttacttgcacagttggcggagggcacgttagcactaaaaaataacgtgttgatcatcttcggtaatttgcctgcgatgcgtacgaatcgacgttatttacatgatgatttgaatcggatgtttggtggccgttatctgaattttccgttaggaaatgagcgatcacgtgcggctgaacttgaaaacgttgtgaatcgcttttttgctgaaccttcggtgtcgtcgaccaatattcgctggcatattgatctgcataccgctatacgcgcttctcaccatgagcaatttgcgttgttacctgctcagaatcgccccttttctgctgaatttatgcaatggttgcatgacagcgatattgatgcgctcgtttatcatcgtgagaaagccgggactttcagccattttctgagtgaaaagtttggcgcggatagctgtacgatggagatgggtaaagcaatgccttttggggaaaatgatttaacaagatttcaaaaaattaccgatgcgctttatggtttaatttctttatcgcaaataaccgcacgtattaaatttgagctgaaacattaccaggtaattaattccattattaagagtcacgacagttttcaacttcatattcccgcagataccttgaactttactgaattgccagaaggatttgaaatcgccagccaacatgatcaccattggaaaattaaatttccagcgaaatttattttatttcctaatgctgaggttgctaatggattacgagcaggattgttacttgctttaaataaaaaataattaaataaataaggcattattccattttcttcctgaagccgtgagaatttttttcagaaagatttagcagtcaactgcttctttaatgacggacgggtactatcatgataaaaaataataaaactcaacaaaacctttcggcagagaaatttgctgatacacaaacgcttcatcgagggctgagtgcacgtcatattcaattgatttccattggtggtgctattggcacaggtttatttatggggtcaggaaaaactattgccgtatcgggtacatcgatcattattacctatgcgattgttggtttttttgtctatatggtgatgcgggcaatgggagaattgctgctgactaaactgaattatcgctcttttgctgatttcgtatcggattatttaggtaccaaagccagtttttttctcggctggacttattggatgagttggattgtctcttgtattgctgatgttgttgtatgtggcggctacattcaatattggtttcccggcgtctctctttgggtgcccgcatttataacgctaggtttactggggacttgtaatcttctttctgtccgcttatttggcgaagctgaattctggttcgccatgattaaggtcattgcgattttagcgttgattattattggcgttggtatggtgatggtaggttggcaatcaccggatggtacgatcgcctctgtgaataatttgactgatccatcggtatttctgccaaatggtatttttggtttttttgctggttttcaaatcgcgattttttcttttactggtgttgaattagttggcacgatgacggcagaaacaaaagatccggaaaagatattgccgaaagcaattaattatatcccgatgagaattatgattttctatattttctccatgttgagcatcattgctgtcacttcttggggacggatctcagctgaaaccagcccttttgtgacactatttgccctggcgggtctgcctgctgctgccgcagtggttaattttgttgcattaacgtcggcaatgtcctctgctaatagtggattatatgcttgtacacgtatgctttatggcttatcaacggaaaagaatgcacatcggaaatttaaaattctttcccgcaatacggcgattcctgtacatagtctgatattttcttgtttctgtatggtggtgggtacgtcacttttatttatcgtaccgaatgtcatgcagttatttactattgtatcaaccgttgcttcggttatggtgatttatagctggtgtgtgattttgattgcctatttggtttatcgtaagaattatcctgatgtgcataaacgttcaatatttaagatgcctttaggggtgttaatgacttggctgaccctgatttttttcatctttaccatagtggtaatggtttttgatccggataccctgatcgcactctgtggcacgcctttatggtttattatgttaagtattttatggcgcgtaaaaaagaaaaatgaggcacagaaagaacagcgttatcagatagcgaaagagagttttcgttcataggcagctaattgagaaataataaattgaagcagatagaaaaatggcttcaatgacgatctcatattagccaaagttgcgtttatttcttctgattttactcccgattgagtcatttgttagggaatggctcgcacctgcaaaatgtttataccctatggatttcaagatggatcgcgacggcaagggagagaatccccgggagatgattagtcgaatccagcattgaatattcgtaacttcggtgctttcattaaaatttaatcacaattgttaatgatttattttatttatcatcacattttttaattaattatgagctgttcactgacaatgttcaatagacaggctgaacgtctgttataaaaaacgtcacgccaaattggctaaataatgtcaataactagcgtgaggtaacgacattacgtgacttgaatatgggcacaataatatgtttgtgaaatgtgattatgggaatgaaaaagcccgttaagcttggtatttatcggatgtgtagccttgttgtctggaatccacttggtgggaatcatgatatcggtaacgttgatatgcggacgttcaataaccattttagtcaacgcctttggtctctctacagtaagagcatacagcatcaatctttgctattaatgtatctcaaatagtacgggatatagattaaatattaatattactaattgtttgataattaattgtatgtaaatatatatgtattatcaattgtctactgatgattgataactgttgtgaaggtggatgttcatagtgagtgaaatttagcgatccacgaggaaagtcgaaatgggtcataaagtttccatagctatgacactgcctttaaattgctaataaaatcaataatattaatataggcgtatatgcaacaagttaacatctcaaacagccaccgtctggttcaatctgaggctgaattactcgaccttattctcaccgaagtgactaatgcaccacatccggatctcgttattatggcagggcatttcatgctcttccttgacgaagaccgaggatgccttgtcccgggagtcatcgaagaaaatacggctcctatgcgagaaaaaattgagcgacgcgtaggaatctttcctggatacacttgggaacttggtgtgcgaatcgcagaacagcttgaacatcaattcgaagcgataaaattcctgctgctcatcaacgattggcaatatgtttcgcgcgacagcgggccagcatctgagctaagacgtgccttctatgagcaattctccgcgcttccggcttcgtacaaatctatcttagagcgcagtgggcaattttctgagcaaaacatgctcgcaagccggaaacatcctgttgcctatccagagacttggctgaaatatcgcttccagaaaagtgccgataagttggtcaaagcagggctgttaaatcgccgcgttctcgacaatggccccgatgccggaaccgaaatttcgcttgtggacgaaaacggcgattataaacctctcattacctgcggcgttaccggatgtgcgggagagattactgagatgatctccgaggtctacaaggcgcaacatcgccttctggtgatctttgcccccggcgaatgcttccaaccagtcaaaacaggggtaagcacggcgctctctctgtatgggctttcgggcatgaaggtgattgttgcggatcccggtggaagcggagagatgcagacacaagagatctactcgaagctcgttaacgttgccgtcttcacttcctgatgggagtcgctatgaatgtcaatgaaaacccgactggcgtaatctatctggatcattgtgctacgacaccatgctttcctgaggtcgtcgacatcatgcgattctacatggagcatgaattcggtaattcttcctccgcccatgtgatgggacgtcgtgcccggcatgcgatagagaacgccgcccaacaagttgcgtctctcatcggtgctcgcccagaggagattgcctttacatcgggggccacagaagccaacaatattgcgcttttctcaagttttgctcataacgaatgcgctcctgcgggagcgctgctttgccctatcgaccacaaatctgtgttgcttgtcggcaaagagttgagtcgtcgggggcttgctgttgaatacctgccggttgccgccaatggccgggtacaaccggaagatgtcatcaccaaattgaccgccgacacccgtatcgtcagcgttgctcatgtgaattccgaattaggtacagttcagccggtggatgaaattgccgcgatcacacgtcggtcaggcgcttggctacatgtggatgctgtccagtctatcggcaaaattcccgtgaacgtcaaagagactggaattgatatgctttcattttccgcccacaaaatgcggggaccgaaaggagttggggcgctcttcgtcgatgcgcgtgttgcggggcatttgaggcccttcatctatggtggcggccagaatcatttgcgcagcggcaccttgccaacgccgctgattgttgggtttggccttgcgtgtcagatgattcagtcaacccttattcaacgtcaagcaaaagtcactgcattgagagactattttattactcgccttcatcaaagggtgccgaacgccgtgttgaataccgatatctcttgcagttccccatacatcgtgaacgttcagttcgaaggtatcgcttcggaggcgctaatatccgggttgcatcaggtggctatatcgtcaggttcagcctgcaattccgcggaactacagccttcgcacgtgcttacaggcatcggcttgagctcggctcaggctaatgcgtcggttcggttctgttttgatccggatctcgataatgcgatattggacaccgcaattgaacaccttgtcttccgattaaattctattcgctaggagcattatctatgactatgcaaacttcctcctcaagcgcaggcactggtttttacgaacgggctttcggtagtttctctgcggaagcggtatccgaggtacgcaaagagacctatggcgaagacttggggcagaacaactggtcctctgctgatgagtttagaaagttctcccaatggcttcaattatctgacagctctcatgtgctggatgtatgcagtgggtccggagggccggctctgtttttggcaaggaccagtggctgtagcgtgacgggggttgacattcatcctcacggcctccttactgcccggcaacttgcggcagatttcggactggaagatcgaagcaacttcgtcgacagtgatgttcgtcagcctctgccatttcctgatggcacttttgatgcattatggtgtatcgactcggtaattcatattccggatcgattggccttgctgcgcgaatggtgtcgactactgaaaccgggcggccggttcttgtataccgatcctactttagtaaccggcatgctgagtaaagacgaaatcatgatacgtggcatgccgggttatttcctctatagcccgcttgggttaaacgagcgtttaatcagcgaggcgggcctttgcctcgaaaggcaggtggatcttacccaaagtgttgttgaacttagtgagcgctggcgtgccgggcgtgagaagcgcagggagcaatttattgcaatagagggtgaagaagcgttcgagcggatgcagaatttcttgtccaccacacagctagtctcaattgaacggaggctgtcgcgcgtggcctttattggttatcgtccgtaatatctcttacctctttgccctattgggcaaggaggtatcttacctattagatgtgaataatgatgttaacctaccgcagtgcattcaacttcactatcttgggttggatgtctggtttgaccgcttgctaaaaattcaatgaatgattgaatctgtttactcgtgaagtaattatgttgtattgactatgctaaaccgaatttaaattaatttaaagtaaatgtagcgattgttcagaaatatatttttaatgttatggaggtgtgtattttatttaattatattttagatttttggaattaatctaaataattatttttgttttattatcagcatgatgttcttattgcgattataatatatttttaaccattgtagtataaatggttatatagtcattttattatttttatgttgccttgatatataaagtaaatattttttattttaatcatattggaatttgtttttgttttttatgatctaataacatatcgttatctacgtcatttggtagcaatagagaatgatttaattggttaatttattatctgtcatctgtaatgatatgttttaaaataagtatattaataacaacaatgaaatttatttttattccactaaacgttaaacttcttaattaaataaagcaaggagataagtatgattttaaataaaaaagttttcctgatttccccttttttactcgcaatgagtagttttagtatggcatgtaagacagatccaaagatagaaaaaataatcaataaaaatggactggaaaataccaaagtgatgtctatgtataaaaattgcacactttcagtttcagcagatacaccgaataaagtgacattagtaaataataaagcggcaaatcgtgatactaaagcagaaaaggcgatgtactggtatagagggatgggaataaaggaatataaagcatttcaccagaataagtataaaagccttccttgtgttaaaggagaaaatttttgtggaattgctcccgaatatacttattctcaaggttatctgacaaataaaaaccctggcgttgttgttgagtttagtacaatagaaccgggatggttatataatgaatttacaactaaacataagtgtcaaattaaagcagagggaggaggaacatacgggcttggtgtgatagggacatcagcgagttgtgataataaatataagaaacttgtaatagggaatgtatttaataaatggttggaaaagccagccaaaatagatcccatcatttcttatgtattattagcaaaatagatttcagctataaataatttttgttgaaatatattgcaccgaatgtttataacttcggtgctttttattggtaatggattttaagtgaacttatacttatccgtgttacttgtaaataaaatagacatttataatattttttatgtaaaaatatactttacaggcaagatattatcatgtggtaaaagaaaattataattagtagatattctacaataagtatgaataaagattttatctttttgaactgttttgatgactataccctatggatttcaagatgcatcgcgacggcaagggagtaaatccccgggagcatagataacgatgtgaccggggtgagtgagtgcagccaacaaagaagcaacttgaaagatgacgggtatataattgcaattagataatgtcatttatattgattttgaatggtaaataggtatttattttatttacatgatattgtaataaataaaaaagtatctatttcaaatgttattgaaatgatctttttttgtgtttatccggttttttatttaattattatagggcttgttttttttgatttcataatctacctttatttaataaggctaataacaagagaaactgattaaatgatatgatttatattgcaaagttattttgttgctggtttcttatttgtagtggagttttatttatagtggcattgtacgttaggtcattatgtgtcggtaaagatgatgactggatttattaataacggctatgaaatatatcttcgttcttttgggtatcaataccatcgataaagtaaggagagaagtatgagttttaataaaaaagcctttctgattgccactttattagttgtgagccactttagtatggcatgtaatactgatccaatggtggaacatataataaaaagttatggcctacaagagactaaagtgatgtctatgtataaaaattgtgaattggatgtggtgaataccggaaatagaattatattaactaataacaaatctaaaaataggaatgaacgtgcagagatagcgatgtactggtatcgaggaatgggaatagaagaatttaagttatttgatagtaataagtttaagagtattccttgtgttaacgtgccaaatcgcttttgcggaatttctcctgaatatacttacgccaagagctacccgatgagagaagataaaaaattcgttatagagtttagtaccgtagaacctggctggctatataatgaatttaccactaaacataactgcgaaattgatgttgaatcaagaggagaatcatatgggttgggtggaataggtgcattgaaaaaagataagtcaaattgtcagcctaaaggttataaggtaggagatgagtttaataagtggctatcggaaaagccagttaaaatagaggcgataattgcttatatacaattacccatatcagattaatccttaatatctgttataaataacttttcaaaatagtagaacacttggagggaactcagtccaatttttgcaatctgatcaattgtagataatcccaaaccactaaacggactgagttatgcctatcatagcacctataccccgcaatgaacgacgccagatgaaaaaaattatccagaacacccgagataaagattatgctcgcaggctcatggccatattgatgctgcatcgaggcgagtctgtctctctggtcgccaaaaccctttgcgccagtcgttcttctgtctatcgctggataaactggttgactttatatggtctggaaggactcaaaagcctgcctgtgggcagacccgctgtctggaatttaatcccgctttatcctttactgtcttttttattgcaatattctccccagcaattgggctgcctgcgttctcgctggagtcttgagttttttataattaaaatcaatgaattattaaacataaaattatccatcagtaccttctatcgttacttacataaaatgggtatcgtgtggcgaagggcagccccgacgcttaaattacccgatcccgagtaccatgaaaaaatggcgaaaattaccgaggcattgtcaacgtgttcagaaaaacatcccgttttttatgaagatgaagtcgacatcgagctgaatccaaaaatcggggctgactggtatttaaaagggcaacagaaacgtatagtgacaccaggaaaaaaccaaaaacattattttgcaggttgcctgaatgttcaaacgggaaaagtgacttatgctgacgggttaaataagaattctcagttatttatcaatgtattggaagaacttgaacgccagtattgtcatgctgaaaccctcactttgattttggataattacagtatccataaaagccgacgggtcagagattggctggcttgtcatcctaaatttaatctgttgtttttacctgtttattcaccctggctgaataaaattgagcgtctgtggcaatccttacatgaaacggtgacacgaaatcatggctgtcagtatatgtggcaattgcttgagaaagtgaaaacgtttttaaattcatgtccctacaggaatagcagagaataaaaagagtgagtgtattataattatgaaaagttatttataatcgtgtcattatcagctttaaactttcttttttagcgccgaatgtcttatcgctttggtgctttttcttggttaaagctaattgtctttgctggaggatataatgggtagaactcgatagaatgttaaaggaataaatgtaaattacagtctcgaaagaatt
